(19) United States
(12) Patent Application Publication
(10) Pub. No.: US 2022/0220473 A1
(43) Pub. Date: Jul. 14, 2022

(54) PROTEIN TRANSLATIONAL CONTROL

(71) Applicant: The Regents of the University of California, Oakland, CA (US)

(72) Inventors: Eugene Yeo, La Jolla, CA (US); Frederick Tan, Encinitas, CA (US)

(21) Appl. No.: 17/604,128

(22) PCT Filed: Apr. 16, 2020
(86) PCT No.: PCT/US2020/028546

§ 371 Date: Oct. 15, 2021

Related U.S. Application Data
(60) Provisional application No. 62/834,582, filed on Apr. 16, 2019.

(51) Int. Cl. C12N 15/11; C12N 15/67; C12N 9/22

(52) U.S. Cl. CPC C12N 15/111; C12N 15/67; C12N 9/22; C12N 2750/14143; C12N 2310/20; C12N 2310/317; C07K 2319/09

(57) ABSTRACT

Provided herein are compositions and methods for regulating protein translation. The compositions include a Cas polypeptide and a capped-sgRNA that includes (i) an m7G cap or an analog thereof; (ii) a spacer capable of specifically hybridizing with a target sequence in an RNA molecule; and (iii) a direct repeat capable of binding to the Cas polypeptide. The disclosure further provides methods of regulating translation of an mRNA in a cell, the method comprising contacting the cell with a nucleic acid comprising (a) a sequence encoding a Cas polypeptide; and (b) a sequence encoding a capped-sgRNA comprising (i) an m7G cap or analog thereof; (ii) a spacer capable of specifically hybridizing with a target sequence in an RNA molecule; and (iii) a direct repeat capable of binding to the Cas polypeptide.

### CROSS-REFERENCE TO RELATED APPLICATIONS

[0001] This application claims priority to U.S. Patent Application Ser. No. 62/834,582, filed Apr. 16, 2019, which is incorporated herein by reference in its entirety.

### STATEMENT OF GOVERNMENT SUPPORT

[0002] This invention was made with government support under EY029166 and NS103172, awarded by the National Institutes of Health. The government has certain rights in the invention.

### SEQUENCE LISTING

[0003] The instant application contains a Sequence Listing which has been submitted electronically in ASCII format and is hereby incorporated by reference in its entirety. Said ASCII copy, created on Apr. 16, 2020, is named Sequence_Listing.txt.

### BACKGROUND

[0004] Existing RNA-targeting CRISPR-Cas applications provide tools to degrade RNA or modulate RNA structure but do not, on their own enhance gene expression or increase translational protein control. Likewise, existing methods of enhancing and/or increasing gene expression, such as the delivery of messenger RNAs, prove to be technically challenging. Indeed, there are few known or well characterized methods to increase mRNA translation.

[0005] The vast majority of gene regulatory drugs have been designed to knockdown gene expression (i.e. siRNAs, miRNAs, anti-sense, etc.). Some methods exist to enhance gene expression, such as the delivery of mRNAs; however, therapeutic delivery of such large and charged RNA molecules is technically challenging, inefficient, and not particularly practical. Classical gene therapy approaches involve delivery of a gene product as viral-encoded products (e.g. AAV or lentivirus-packaged products); however, these methods suffer from not being able to accurately reproduce the correct alternatively spliced isoforms in the correct ratios. In addition, gene delivery can exclude important non-coding regulatory sequences. Other methods of regulating protein translation involve engineered RNA binding proteins which are not easily delivered to cells and can be highly immunogenic. Often, engineered RNA binding proteins require extensive engineering for each target RNA sequence and certain of these possess limits to their applicability. More problematically, the act of expression of certain of these types of engineered RNA binding proteins, when combined with translation initiation factor functions in a fusion protein context, could disrupt the stoichiometry of translation machinery maintained by the cell.

[0006] As such, there is a need to provide compositions and methods for recruiting translational pre-initiation complexes in a manner which overcomes gene therapy barriers and protein engineering challenges, thereby controlling translation in cells and in gene therapy techniques.

### SUMMARY

[0007] In one aspect, provided herein are complexes comprising: a Cas polypeptide; and a capped-sgRNA comprising (i) an m7G cap or an analog thereof; (ii) a spacer capable of specifically hybridizing with a target sequence in an RNA molecule; and (iii) a direct repeat capable of binding to the Cas polypeptide. In some embodiments of any of the complexes described herein, the RNA molecule is a messenger RNA (mRNA). In some embodiments of any of the complexes described herein, the mRNA has an endogenous m7G cap. In some embodiments of any of the complexes described herein, the target sequence is downstream of the endogenous m7G cap of the mRNA. In some embodiments of any of the complexes described herein, the mRNA comprises a start codon, and wherein the 5′ end of the target sequence is upstream of the start codon. In some embodiments of any of the complexes described herein, the 5′ end of the target sequence is between 1 to 50 nucleotides upstream of the first nucleotide of the start codon. In some embodiments of any of the complexes described herein, the 5′ end of the target sequence is between 1 to 15 nucleotides upstream of the first nucleotide of the start codon. In some embodiments of any of the complexes described herein, the target sequence comprises the start codon. In some embodiments of any of the complexes described herein, the mRNA comprises a start codon, and wherein the 5′ end of the target sequence is downstream of the start codon. In some embodiments of any of the complexes described herein, the 5′ end of the target sequence is between 1 to 50 nucleotides downstream of the last nucleotide of the start codon. In some embodiments of any of the complexes described herein, 5′ end of the target sequence is between 1 to 15 nucleotides downstream of the last nucleotide of the start codon. In some embodiments of any of the complexes described herein, the 5′ end of the target sequence is between 1 to 5 nucleotides downstream of the last nucleotide of the start codon. In some embodiments of any of the complexes described herein, the spacer is at least 80% complementary to the target sequence. In some embodiments of any of the complexes described herein, the spacer is at least 90% complementary to the target sequence. In some embodiments of any of the complexes described herein, the spacer comprises about 10 to about 40 nucleotides. In some embodiments of any of the complexes described herein, the spacer comprises about 15 to about 25 nucleotides. In some embodiments of any of the complexes described herein, the spacer comprises about 20 nucleotides. In some embodiments of any of the complexes described herein, the spacer is connected to the m7G cap or analog there of via a linker. In some embodiments of any of the complexes described herein, the linker comprises about 5 to about 25 nucleotides. In some embodiments of any of the complexes described herein, the linker comprises about 8 to about 15 nucleotides. In some embodiments of any of the complexes described herein, the linker is not complementary to any sequence in the mRNA. In some embodiments of any of the complexes described herein, the linker is conjugated to the m7G cap or analog thereof via polyethylene glycol. In some embodiments of any of the complexes described herein, the Cas polypeptide is a nuclease-deficient Cas (dCas) polypeptide, wherein the dCas comprises an inactivated target cleavage domain and a retained guide cleavage domain. In some embodiments of any of the complexes described herein, the nuclease-deficient Cas polypeptide is a nuclease-deficient Cas13 (dCas13) polypeptide, wherein the dCas13 is dCas13b or dCas13d. In some embodiments of any of the complexes described herein, the direct repeat is capable of binding to a nuclease-deficient Cas13 (dCas13) polypeptide, wherein the dCas13 is dCas13b or dCas13d. In some embodiments of any of the complexes described herein, the nuclease-deficient Cas polypeptide is a nuclease-deficient Cas9 (dCas9) polypeptide. In some embodiments of any of the complexes described herein, the direct repeat is capable of binding to a nuclease-deficient Cas9 (dCas9) polypeptide. In some aspects, provided herein is a nucleic acid comprising a sequence encoding the capped-sgRNA in any of the complexes described herein. In some embodiments, the nucleic acid further comprises a sequence encoding the Cas polypeptide in any of the complexes described herein.

[0008] In another aspect, provided herein are nucleic acids comprising a sequence encoding a capped-sgRNA, wherein the capped-sgRNA comprises: (i) an m7G cap or analog thereof; (ii) a spacer capable of specifically hybridizing with a target sequence in an RNA molecule; and (iii) a direct repeat capable of binding to a Cas polypeptide. In some embodiments of any of the nucleic acids described herein, the RNA molecule is an mRNA. In some embodiments of any of the nucleic acids described herein, the mRNA has an endogenous m7G cap. In some embodiments of any of the nucleic acids described herein, the target sequence is downstream of the endogenous m7G cap of the mRNA. In some embodiments of any of the nucleic acids described herein, the mRNA comprises a start codon, and wherein the 5′ end of the target sequence is upstream of the start codon. In some embodiments of any of the nucleic acids described herein, the 5′ end of the target sequence is between 1 and 50 nucleotides upstream of the first nucleotide of the start codon. In some embodiments of any of the nucleic acids described herein, the 5′ end of the target sequence is between 1 to 15 nucleotides upstream of the first nucleotide of the start codon. In some embodiments of any of the nucleic acids described herein, the target sequence comprises the start codon. In some embodiments of any of the nucleic acids described herein, the mRNA comprises a start codon, and wherein the 5′ end of the target sequence is downstream of the start codon. In some embodiments of any of the nucleic acids described herein, the 5′ end of the target sequence is between 1 to 50 nucleotides downstream of the last nucleotide of the start codon. In some embodiments of any of the nucleic acids described herein, the 5′ end of the target sequence is between 1 to 15 nucleotides downstream of the last nucleotide of the start codon. In some embodiments of any of the nucleic acids described herein, the 5′ end of the target sequence is between 1 to 5 nucleotides downstream of the last nucleotide of the start codon. In some embodiments of any of the nucleic acids described herein, the spacer is at least 80% complementary to the target sequence. In some embodiments of any of the nucleic acids described herein, the spacer is at least 90% complementary to the target sequence. In some embodiments of any of the nucleic acids described herein, the spacer comprises about 10 to about 40 nucleotides. In some embodiments of any of the nucleic acids described herein, the spacer comprises about 15 to about 25 nucleotides. In some embodiments of any of the nucleic acids described herein, the spacer comprises about 20 nucleotides. In some embodiments of any of the nucleic acids described herein, the spacer is connected to the m7G cap or analog thereof via a linker. In some embodiments of any of the nucleic acids described herein, the linker comprises about 5 to about 25 nucleotides. In some embodiments of any of the nucleic acids described herein, the linker comprises about 8 to about 20 nucleotides. In some embodiments of any of the nucleic acids described herein, the linker is not complementary to any sequence in the mRNA. In some embodiments of any of the nucleic acids described herein, the linker is conjugated to the m7G cap or analog thereof via polyethylene glycol. In some embodiments of any of the nucleic acids described herein, the nucleic acids further comprise a sequence encoding a RNase P processing site. In some embodiments of any of the nucleic acids described herein, the nucleics further comprise a poly-T sequence. In some embodiments of any of the nucleic acids described herein, the nucleic acids further comprise a poly-T sequence downstream of the sequence encoding a RNase P processing site. In some embodiments of any of the nucleic acids described herein, the nucleic acids further comprise a sequence encoding the Cas polypeptide. In some embodiments of any of the nucleic acids described herein, the Cas polypeptide is a nuclease-deficient Cas polypeptide. In some embodiments of any of the nucleic acids described herein, the nuclease-deficient Cas polypeptide is a nuclease-deficient Cas13 (dCas13) polypeptide, wherein the dCas13 is dCas13b or dCas13d. In some embodiments of any of the nucleic acids described herein, the direct repeat is capable of binding to a nuclease-deficient Cas13 (dCas13) polypeptide, wherein the dCas13 is dCas13b or dCas13d. In some embodiments of any of the nucleic acids described herein, the nuclease-deficient Cas polypeptide is a nuclease-deficient Cas9 (dCas9) polypeptide. In some embodiments of any of the nucleic acids described herein, the nucleic acids further comprise one or more RNA polymerase II promoters. In some embodiments of any of the nucleic acids described herein, the sequence encoding the capped-sgRNA and the sequence encoding the Cas polypeptide are expressed from the same promoter. In some embodiments of any of the nucleic acids described herein, the sequence encoding the capped-sgRNA and the sequence encoding the Cas polypeptide are expressed from different promoters. In some aspects, provided herein are vectors comprising the nucleic acids of any of the above embodiments. In some embodiments, the vector is an AAV vector. In some embodiments, provided herein are cells comprising the nucleic acid of any of the above embodiments.

[0009] In another aspect, provided herein are methods of regulating translation of an mRNA in a cell, the method comprising contacting the cell with a nucleic acid comprising (a) a sequence encoding a Cas polypeptide; and (b) a sequence encoding a capped-sgRNA comprising (i) an m7G cap or analog thereof; (ii) a spacer capable of specifically hybridizing with a target sequence in an RNA molecule; and (iii) a direct repeat capable of binding to the Cas polypeptide. In some embodiments of any of the methods of regulating translation of an mRNA in a cell described herein, the Cas polypeptide is a nuclease-deficient Cas13 (dCas13) polypeptide. In some embodiments of any of the methods of regulating translation of an mRNA in a cell described herein, the dCas13 polypeptide is dCas13b or dCas13d. In some embodiments of any of the methods of regulating translation of an mRNA in a cell described herein, the dCas13b comprises an inactivated target cleavage domain and a retained guide cleavage domain. In some embodiments of any of the methods of regulating translation of an mRNA in a cell described herein, the dCas13d comprises an inactivated target cleavage domain and a retained guide cleavage domain.

### INCORPORATION BY REFERENCE

[0010] All publications, patents, patent applications, and information available on the internet and mentioned in this specification are herein incorporated by reference to the same extent as if each individual publication, patent, patent application, or item of information was specifically and individually indicated to be incorporated by reference. To the extent publications, patents, patent applications, and items of information incorporated by reference contradict the disclosure contained in the specification, the specification is intended to supersede and/or take precedence over any such contradictory material.

### DESCRIPTION OF THE DRAWINGS

[0011] A better understanding of the features and advantages can be obtained by reference to the following detailed description that sets forth illustrative embodiments and accompanying drawings (“Figure” and “Fig.” herein), of which:

[0012] FIGS. 1A-1G show modulation of translation using dCas and capped-sgRNA. FIG. 1A shows exemplary constructs for generating dCas and Capped-sgRNA. FIG. 1B shows an exemplary structure of unprocessed capped-sgRNA containing an RNase P processing site. FIG. 1C shows an exemplary chemical composition of a capped-sgRNA. FIG. 1D shows capped-sgRNA processing by RNase P. FIG. 1E shows a schematic of localized capped-sgRNA recruitment and binding of dCas to the capped-sgRNA. FIG. 1F shows an exemplary two construct system for expressing dCas and capped-sgRNA. FIG. 1G shows the sgRNA targeting window in the target ATF4 ORF. FIG. 1H shows results of capped-sgRNA modulation on the translation of the target ATF4 ORF. FIG. 1I shows results of using the control uncapped-sgRNAs on the translation of the target ATF4 ORF.

### DETAILED DESCRIPTION

[0013] Embodiments according to the invention disclosed herein will be described more fully hereinafter. However, it should be understood that such embodiments are provided merely by way of example, and numerous variations, changes, and substitutions can occur to those skilled in the art without departing from the scope of this disclosure. It should also be understood that various alternatives to the specific embodiments described herein are also within the scope of this disclosure.

[0014] Where values are described in terms of ranges, it should be understood that the description includes the disclosure of all possible sub-ranges within such ranges, as well as specific numerical values that fall within such ranges irrespective of whether a specific numerical value or specific sub-range is expressly stated. All numerical designations, e.g., pH, temperature, time, concentration, and molecular weight, including ranges, are approximations which are varied (+) or (−) by increments of 1.0 or 0.1, as appropriate, or alternatively by a variation of +/−15%, or alternatively 10%, or alternatively 5%, or alternatively 2%. It is to be understood, although not always explicitly stated, that all numerical designations are preceded by the term “about”. It also is to be understood, although not always explicitly stated, that the reagents described herein are merely exemplary and that equivalents of such are known in the art.

[0015] Unless otherwise defined, all terms (including technical and scientific terms) used herein have the same meaning as commonly understood by one of ordinary skill in the art to which this invention belongs. It will be further understood that terms, such as those defined in commonly used dictionaries, should be interpreted as having a meaning that is consistent with their meaning in the context of the present application and relevant art and should not be interpreted in an idealized or overly formal sense unless expressly so defined herein. While not explicitly defined below, such terms should be interpreted according to their common meaning.

[0016] Unless the context indicates otherwise, it is specifically intended that the various features of the invention described herein can be used in any combination. Moreover, the disclosure also contemplates that in some embodiments, any feature or combination of features set forth herein can be excluded or omitted. To illustrate, if the specification states that a complex comprises components A, B and C, it is specifically intended that any of A, B or C, or a combination thereof, can be omitted and disclaimed singularly or in any combination. Unless explicitly indicated otherwise, all specified embodiments, features, and terms intend to include both the recited embodiment, feature, or term and biological equivalents thereof.

[0017] As used in the description of the invention and the appended claims, the singular forms “a,” “an” and “the” are intended to include the plural forms as well, unless the context clearly indicates otherwise.

[0018] The term “about,” as used herein when referring to a measurable value such as an amount or concentration and the like, is meant to encompass variations of 20%, 10%, 5%, 1%, 0.5%, or even 0.1% of the specified amount.

[0019] The terms “acceptable,” “effective,” “efficient” or “sufficient” when used to describe the selection of any components, ranges, dose forms, etc. disclosed herein intend that said component, range, dose form, etc. is suitable for the disclosed purpose.

[0020] Also as used herein, “and/or” refers to and encompasses any and all possible combinations of one or more of the associated listed items, as well as the lack of combinations when interpreted in the alternative (“or”).

[0021] As used herein, the term “comprising” is intended to mean that the compositions and methods include the recited elements, but do not exclude others. As used herein, the transitional phrase “consisting essentially of” (and grammatical variants) is to be interpreted as encompassing the recited materials or steps and those that do not materially affect the basic and novel characteristic(s) of the recited embodiment. Thus, the term “consisting essentially of” as used herein should not be interpreted as equivalent to “comprising.” “Consisting of” shall mean excluding more than trace elements of other ingredients and substantial method steps for administering the compositions disclosed herein. Aspects defined by each of these transition terms are within the scope of the present disclosure.

[0022] As used herein, the term “functional” may be used to modify any molecule, biological, or cellular material to intend that it accomplishes a particular, specified effect.

### Translational Enhancement Via M7G Cap Recruitment

[0023] Translation initiation in mammalian cells starts with the binding of the 5′ methyl-7 guanosine (m7G) cap structure by Eukaryotic Initiation Factor 4E (EIF4E), which results in the nucleation of translational pre-initiation complexes on the adjacent 5′ untranslated region (5′UTR) of mRNA. The bound pre-initiation complexes then scan the 5′UTR unidirectionally (5′ to 3′) for suitable start codons (e.g., “AUG”) to prime and initiate translation. The 5′ m7G cap is an evolutionarily conserved modification of eukaryotic mRNA, and serves as a unique molecular module that recruits cellular proteins and mediates cap-related biological functions such as pre-mRNA processing, nuclear export, and cap-dependent protein synthesis.

[0024] Provided herein are compositions and methods for enhancing protein production by recruiting an m7G cap to an mRNA using a capped-sgRNA and a Cas polypeptide. In the compositions and methods provided herein, the bound pre-initiation complexes do not necessarily scan the 5′UTR unidirectionally 5′ to 3′.

[0025] In some aspects, provided herein is a complex comprising at least one Cas polypeptide or nucleic acid encoding the at least one Cas polypeptide, and at least one m7G capped single guide RNA (capped-sgRNA) or nucleic acid encoding the at least one capped-sgRNA, where the at least one capped-sgRNA is capable of targeting the at least one Cas polypeptide to a target sequence in an RNA molecule (e.g., an mRNA). In some embodiments, upon hybridization between the sgRNA and the target sequence, the m7G cap of the sgRNA is brought closer to a desired start codon in the target mRNA as compared to the endogenous m7G cap of the target mRNA. Also provided are methods of regulating translation of an mRNA in a cell, the method comprising contacting the cell with a nucleic acid comprising (a) a sequence encoding a at least one Cas polypeptide; and (b) a sequence encoding at least one capped-sgRNA comprising (i) an m7G cap; (ii) a spacer capable of specifically hybridizing with a target sequence in an RNA molecule; and (iii) a direct repeat capable of binding to the Cas polypeptide.

[0026] In some aspects, provided herein is a complex comprising a Cas polypeptide or nucleic acid encoding the Cas polypeptide, and an m7G capped single guide RNA (capped-sgRNA) or nucleic acid encoding the capped-sgRNA, where the capped-sgRNA is capable of targeting the Cas polypeptide to a target sequence in an RNA molecule (e.g., an mRNA). In some embodiments, upon hybridization between the sgRNA and the target sequence, the m7G cap of the sgRNA is brought closer to a desired start codon in the target mRNA as compared to the endogenous m7G cap of the target mRNA. Also provided are methods of regulating translation of an mRNA in a cell, the method comprising contacting the cell with a nucleic acid comprising (a) a sequence encoding a Cas polypeptide; and (b) a sequence encoding a capped-sgRNA comprising (i) an m7G cap; (ii) a spacer capable of specifically hybridizing with a target sequence in an RNA molecule; and (iii) a direct repeat capable of binding to the Cas polypeptide.

[0027] Each strand of DNA or RNA has a 5′ end and a 3′ end, corresponding to the carbon position on the deoxyribose (or ribose) ring. “Upstream” as described herein can mean toward the 5′ end of an RNA molecule and “downstream” as described herein can mean towards the 3′ end of an RNA molecule. A “start codon” as described herein can refer to the first codon of a messenger RNA transcript translated by a ribosome. The most common start codon is AUG. Alternative start codons from both prokaryotes and eukaryotes include, but not limited to, GUG, UUG, AUU, and CUG.

[0028] The term “cell” as used herein may refer to either a prokaryotic or eukaryotic cell, optionally obtained from a subject or a commercially available source.

[0029] The term “encode” as it is applied to nucleic acid sequences refers to a polynucleotide which is said to “encode” a polypeptide, an mRNA, or an effector RNA if, in its native state or when manipulated by methods well known to those skilled in the art, can be transcribed and/or translated to produce the effector RNA, the mRNA, or an mRNA that can for the polypeptide and/or a fragment thereof. The antisense strand is the complement of such a nucleic acid, and the encoding sequence can be deduced therefrom.

[0030] As used herein, the term “expression” or “gene expression” refers to the process by which polynucleotides are transcribed into mRNA and/or the process by which the transcribed mRNA is subsequently translated into peptides, polypeptides, or proteins. If the polynucleotide is derived from genomic DNA, expression may include splicing of the mRNA in a eukaryotic cell. The expression level of a gene may be determined by measuring the amount of mRNA or protein in a cell or tissue sample; further, the expression level of multiple genes can be determined to establish an expression profile for a particular sample.

[0031] The term “target sequence” can refer to a nucleic acid sequence present in an RNA molecule to which a spacer of a guide RNA (e.g, a capped-sgRNA as disclosed herein) can hybridize, provided sufficient conditions for hybridization exist. Hybridization between the spacer and the target sequence can, for example, be based on Watson-Crick base pairing rules, which enables programmability in the spacer sequence. The spacer sequence can be designed, for instance, to hybridize with any target sequence.

[0032] The “spacer” or “spacer sequence” is comprised within a single guide RNA can include a nucleotide sequence that is complementary to a specific sequence within a target RNA.

[0033] “Binding” as used herein can refer to a non-covalent interaction between macromolecules (e.g., between a protein and a nucleic acid). While in a state of non-covalent interaction, the macromolecules are said to be “associated” or “interacting” or “binding” (e.g., when a molecule X is said to interact with a molecule Y, it means that the molecule X binds to molecule Y in a non-covalent manner). Binding interactions are generally characterized by a dissociation constant (Kd) of less than 10⁻⁶ M, less than 10⁻⁷ M, less than 10⁻⁸ M, less than 10⁻⁹M, less than 10⁻¹⁰ M, less than 10⁻¹¹ M, less than 10⁻¹² M, less than 10⁻¹³ M, less than 10⁻¹⁴ M, or less than 10⁻¹⁵M. Kd is dependent on environmental conditions, e.g., pH and temperature, as is known by those in the art. “Affinity” can refer to the strength of binding, and increased binding affinity is correlated with a lower Kd.

[0034] The terms “hybridizing” or “hybridize” can refer to the pairing of substantially complementary or complementary nucleic acid sequences within two different molecules. Pairing can be achieved by any process in which a nucleic acid sequence joins with a partially, substantially or fully complementary sequence through base pairing to form a hybridization complex. For purposes of hybridization, two nucleic acid sequences or segments of sequences are “substantially complementary” if at least 80% of their individual bases are complementary to one another. Two nucleic acid sequences or segments of sequences are “partially complementary” if at least 50% of their individual bases are complementary to one another.

[0035] As used herein, “complementary” can mean that two nucleic acid sequences have at least 50% sequence identity. Preferably, the two nucleic acid sequences have at least 60%, 70%, 80%, 90%, 95%, 96%, 97%, 98%, 99%, or 100% of sequence identity. “Complementary” also means that two nucleic acid sequences can hybridize under low, middle, and/or high stringency condition(s).

[0036] As used herein, “substantially complementary” means that two nucleic acid sequences have at least 90% sequence identity. Preferably, the two nucleic acid sequences have at least 95%, 96%, 97%, 98%, 99%, or 100% of sequence identity. “Substantially complementary” can also mean that two nucleic acid sequences can hybridize under high stringency condition(s).

[0037] Low stringency hybridization refers to conditions equivalent to hybridization in 10% formamide, 5×Denhardt's solution, 6×SSPE, 0.2% SDS at 22° C., followed by washing in 1×SSPE, 0.2% SDS, at 37° C. Denhardt's solution contains 1% Ficoll, 1% polyvinylpyrolidone, and 1% bovine serum albumin (BSA). 20×SSPE (sodium chloride, sodium phosphate, ethylene diamide tetraacetic acid (EDTA)) contains 3M sodium chloride, 0.2M sodium phosphate, and 0.025 M (EDTA). Other suitable moderate stringency and high stringency hybridization buffers and conditions are well known to those of skill in the art.

[0038] As used herein, “operably linked” refers to the situation in which part of a linear DNA sequence can influence the other parts of the same DNA molecule. For example, when a promoter controls the transcription of the coding sequence, it is operatively linked to the coding sequence.

[0039] As used herein, a “polypeptide” refers to, without limitation, proteins, fragments of proteins, and peptides, whether isolated from natural sources, produced by recombinant techniques, or chemically synthesized. A polypeptide may have one or more modifications, such as a post-translational modification (such as glycosylation, etc.) or any other modification (such as PEGylation, etc.). The polypeptide may contain one or more non-naturally-occurring amino acids (such as an amino acid with a side chain modification). Polypeptides described herein typically comprise at least about 10 amino acids.

[0040] As used herein, “contacting” a cell with a nucleic acid molecule can include allowing the nucleic acid molecule to be in sufficient proximity with the cell such that the nucleic acid molecule can be introduced into the cell.

[0041] A “promoter” can be a region of DNA that leads to initiation of transcription of a gene.

[0042] As used herein, “nuclease-deficient” may refer to a polypeptide with reduced nuclease activity, reduced endo- or exo-DNAse activity or RNAse activity, reduced nickase activity, or reduced ability to cleave DNA and/or RNA. “Reduced nuclease activity” means a decline in nuclease, nickase, DNAse, or RNAse activity of at least about 1%, 2%, 5%, 10%, 15%, 20%, 25%, 30%, 35%, 40%, 35%, 50%, 55%, 60%, 65%, 70%, 75%, 80%, 85%, 90%, 95%, 100% or more or any value between any of the listed values. Alternatively, “reduced nuclease activity” may refer to a decline of at least about 1-fold, 1.5-fold, 2-fold, 3-fold, 4-fold, 5-fold, 6-fold, 7-fold, 8-fold, 9-fold, 10-fold, 15-fold, 20-fold, 30-fold, 40-fold, 50-fold, 60-fold, 70-fold, 80-fold, 90-fold, 100-fold, 500-fold, 1000-fold, 2000-fold or more or any value between any of the listed values.

[0043] “Nucleic acids” may be naturally occurring nucleic acids such as DNA and RNA, or artificial nucleic acids including peptide nucleic acid (PNA), morpholino, locked nucleic acid (LNA), glycol nucleic acid (GNA), and threose nucleic acid (TNA). Nucleic acids disclosed herein can be single-stranded or double-stranded nucleic acids.

### I. m7G Cap

[0044] The m7G cap, or 7-methylguanosine cap, is a guanine nucleotide methylated on the 7 position and can be linked to an RNA molecule (e.g., a sgRNA or an mRNA) via a 5′ to 5′ triphosphate linkage. In one embodiment, capped RNA molecules (e.g., capped-sgRNAs) disclosed herein include a single methyl group on the terminal G residue at the N-7 position. In vivo, the m7G cap structure is added enzymatically to mRNA produced by RNA polymerase II. In one embodiment, the adjacent nucleotides can be 2′-O-methylated to different extents. For example, the m7G cap can be a m7GpppN, or Cap 0, an m7GpppNm, or Cap 1, and an m7GpppNmpNm, or Cap 2. Exemplary structures of Cap 0 and Cap 1, are shown below:

[chemical structure]

[0045] The 5′ m7G cap is an evolutionarily conserved modification of eukaryotic mRNA, and serves as a unique molecular module that recruits cellular proteins and mediates cap-related biological functions such as pre-mRNA processing, nuclear export, and cap-dependent protein synthesis. The capped-sgRNA disclosed herein exploits these biological functions to recruit pre-initiation complexes for enhancement of protein translation.

[0046] The capped-sgRNA disclosed herein includes a nucleic acid sequence which is transcribed by, e.g. an RNA polymerase II, and the sgRNA thereby becomes 5′ capped upon transcription with an m7G cap. The transcription of capped-sgRNA nucleic acid sequence is catalyzed by bacteriophage RNA polymerases, such as, without limitation, RNA polymerase T7, T3, and SP6. When bacteriophage RNA polymerases are used to generate the sgRNAs of the present disclosure, cap analogs initiate transcription. In one embodiment, the m7G(5′)pppG cap analog is incorporated into the sgRNA and simulates the m7G cap structure. In another embodiment, standard cap analogs are incorporated into the sgRNA in the forward (e.g., [m7G(5′)pppG(pN)]) or the reverse orientation (e.g., [G(5′)pppm7G(pN)]) resulting in two forms of isomeric RNAs. In another embodiment, chemical modifications at either the 2′ or 3′ OH group results in the cap being incorporated solely in the forward orientation. In some embodiments, the m7G cap is an anti-reverse cap analog (ARCA), wherein one of the 3′ OH groups (closer m7G) is eliminated from the cap analog and is substituted with —OCH₃. This modification forces RNA polymerases to initiate transcription with the remaining —OH group in G and thus synthesize RNA transcripts capped exclusively in the correct orientation. An exemplary structure of ARCA (m7(3′-O-methyl)-G(5′)ppp(5′)G) is shown below:

[chemical structure]

[0047] Additional cap analogs contemplated herein also include unmethylated cap analogs (e.g., GpppG), trimethylated cap analogs (e.g., m₃^{2.2.7}GP₃G), and m₂^{7,3′-O}GP₃(2′OMe)ApG.

[0048] In one embodiment, the m7G cap disclosed herein includes chemical modifications relative to the naturally occurring m7G cap. For example, chemical modifications that can reduce the sensitivity of the m7G cap to cellular decapping enzymes are useful for the capped-RNAs disclosed herein. Suitable chemical modifications include, without limitation, those with 1,2-dithiodiphosphate. See those described in e.g., Strenkowska et al., Nucleic Acids Res. 44(20):9578-9590 (2016), phosphate-modified cap analogues described in e.g., Walczak et al., Chem Sci. 8(1):260-267 (2017)), as well as those described in Basolo et al., Eur J Endocrinol., 145(5):599-604 (2001), and Borghardt et al., Can Respir J. 2018 Jun. 19; 2018:2732017, all of which are incorporated herein by reference in their entirety.

### II. Capped-sgRNA

[0049] Provided herein are capped-sgRNAs, nucleic acids comprising and/or encoding the capped-sgRNAs, and methods of using the same for regulating protein translation. The capped-sgRNA can include an m7G cap or an analog thereof, a spacer capable of specifically hybridizing with a target sequence in an RNA molecule, and a direct repeat capable of binding to a Cas polypeptide. In some embodiments, the capped-sgRNA includes from 5′ to 3′, an m7G cap or an analog thereof, a spacer sequence, and a direct repeat sequence. In one embodiment, the 5′ cap is linked to the spacer sequence via a linker. In one embodiment, the capped-sgRNA is derived from an unprocessed capped-sgRNA that further includes a Ribonuclease P (RNase P) processing site, and a polyadenylated (poly-A) tail at the 3′ end.

[0050] In some embodiments of the capped-sgRNAs disclosed herein, the spacer sequence and the scaffolding sequence or direct repeat sequence are not contiguous. In some embodiments, a scaffold sequence comprises a direct repeat sequence.

[0051] In some embodiments, the capped-sgRNA sequence is synthetic or comprises non-naturally occurring nucleotides. In some embodiments, a capped-guideRNA of the disclosure or a sequence encoding the guide RNA comprises or consists of modified or synthetic RNA nucleotides. Exemplary modified RNA nucleotides include, but are not limited to, pseudouridine (Y), dihydrouridine (D), inosine (I), and 7-methylguanosine (m7G), hypoxanthine, xanthine, xanthosine, 7-methylguanine, 5, 6-Dihydrouracil, 5-methylcytosine, 5-methylcytidine, 5-hydroxymethylcytosine, isoguanine, and isocytosine. Capped-sgRNAs of the disclosure may bind modified RNA within a target sequence. Within a target sequence, capped-guide RNAs of the disclosure may bind modified RNA. Exemplary epigenetically or post-transcriptionally modified RNA include, but are not limited to, 2′-0-Methylation (2′-OMe) (2′-0-methylation occurs on the oxygen of the free T-OH of the ribose moiety), N6-methyladenosine (m6A), and 5-methylcytosine (m5C). In some embodiments of the compositions of the disclosure, a capped-guide RNA of the disclosure comprises at least one sequence encoding a non-coding C/D box small nucleolar RNA (snoRNA) sequence. In some embodiments, the snoRNA sequence comprises at least one sequence that is complementary to the target RNA, wherein the target sequence of the RNA molecule comprises at least one 2′-OMe. In some embodiments, the snoRNA sequence comprises at least one sequence that is complementary to the target RNA, wherein the at least one sequence that is complementary to the target RNA comprises a box C motif (RETGAETGA) and a box D motif (CUGA).

[0052] In some embodiments, a sequence encoding a capped-guide RNA of the disclosure comprises or consists essentially of a spacer sequence and a scaffold or direct repeat sequence, wherein the spacer and the scaffold or direct repeat are operably linked. In one embodiment, the spacer and scaffold and/or direct repeat are separated by a linker sequence. In some embodiments, the linker sequence may include or consist of 1, 2, 3, 4, 5, 6, 7, 8, 9, 10, 15, 20, 25, 30, 35, 40, 45, 50, nucleotides or any number of nucleotides in between. In some embodiments, the linker sequence may include at least 1, 2, 3, 4, 5, 6, 7, 8, 9, 10, 15, 20, 25, 30, 35, 40, 45, 50, nucleotides or any number of nucleotides in between.

[0053] In some embodiments, therapeutic or pharmaceutical compositions including the capped-sgRNAs or methods of gene therapy using the capped-sgRNAs of the disclosure do not include a PAMmer oligonucleotide. In other embodiments, optionally, non-therapeutic or non-pharmaceutical compositions may include a PAMmer oligonucleotide. In some embodiments of the compositions of the disclosure, a guide RNA or a portion thereof includes a sequence complementary to a protospacer flanking sequence (PFS). In some embodiments, including those wherein a guide RNA or a portion thereof includes a sequence complementary to a PFS, the RNA binding protein may include a sequence isolated or derived from a Cas protein, such as, without limitation, a Cas9, Cas13b, or Cas13d protein. In some embodiments, including those wherein a guide RNA or a portion thereof includes a sequence complementary to a PFS, the RNA binding protein may include a sequence encoding a Cas protein, such as, without limitation, a Cas9, Cas 13b, or Cas13d protein, or an RNA-binding portion thereof. In some embodiments, the guide RNA or a portion thereof does not include a sequence complementary to a PFS.

### Spacer

[0054] The capped-sgRNA disclosed herein comprises a “spacer” or “spacer sequence” that is complementary to a specific sequence within a target RNA. The spacer sequence can be designed to hybridize with any target sequence of interest.

[0055] In one embodiment, the spacer sequence comprised within the capped-sgRNA is about 10 to about 30 nucleotides (e.g., about 11, 12, 13, 14, 15, 16, 17, 18, 19, 20, 21, 22, 23, 24, 25, 26, 27, 28, or 29 nucleotides). In another embodiment, the spacer sequence is about 15 to about 25 nucleotides (e.g., about 18 to about 22 nucleotides, or about 20 nucleotides). In another embodiment, the spacer sequence is at least 50% complementary, at least 60% complementary, or at least 70% complementary to a target sequence in an RNA molecule (e.g., an mRNA). In another embodiment, the spacer sequence is at least 80% (e.g., at least 81%, 82%, 83%, 84%, 85%, 86%, 87%, 88%, 89%, 91%, 92%, 93%, 94%, 95%, 96%, 97%, 98%, or 99%) complementary to a target sequence in an RNA molecule (e.g., an mRNA). In another embodiment, the spacer sequence is 100% complementary to the target sequence. Exemplary spacer sequences for the capped-sgRNAs disclosed herein are:

(SEQ ID NO: 278)
TTTGCTGGAATCGAGGAATGTGCTT
(SEQ ID NO: 279)
GTTGCGGTGCTTTGCTGGAATCGAG
(SEQ ID NO: 280)
TTTCGGTCATGTTGCGGTGCTTTGC
(SEQ ID NO: 281)
AGGAAGCTCATTTCGGTCATGTTGC
(SEQ ID NO: 282)
CTCGCTGCTCAGGAAGCTCATTTCG
(SEQ ID NO: 283)
CCACCAACACCTCGCTGCTCAGGAA

[0056] In another embodiment of the capped-sgRNAs disclosed herein, spacer sequences may comprise a CRISPR RNA (crRNA). In another embodiment, spacer sequences of the disclosure comprise or consist of a sequence having sufficient complementarity to a target sequence of an RNA molecule to bind selectively to the target sequence. Upon binding to a target sequence of an RNA molecule, the spacer sequence may guide one or more of a scaffold or direct repeat sequence and a Cas polypeptide or fusion protein to the RNA molecule. In some embodiments, a spacer sequence having sufficient complementarity to a target sequence of an RNA molecule to bind selectively (partially or substantially) to the target sequence has at least 50%, 55%, 60%, 65%, 70%, 75%, 80%, 85%, 90%, 95%, 96, 97%, 98%, 99%, or any percentage identity in between to the target sequence. In some embodiments, a spacer sequence having sufficient complementarity to a target sequence of an RNA molecule to bind selectively to the target sequence has 100% identity the target sequence.

[0057] In some embodiments of the compositions of the disclosure, a capped-guide RNA or a portion thereof comprises or consists of between 10 and 100 nucleotides, inclusive of the endpoints. In some embodiments, a spacer sequence of the disclosure comprises or consists of between 10 and 30 nucleotides, inclusive of the endpoints. In some embodiments, a spacer sequence of the disclosure comprises or consists of 15, 16, 17, 18, 19, 20, 21, 22, 23, 24, 25, 26, 27, 28, 29, or 30 nucleotides. In some embodiments, the spacer sequence of the disclosure comprises or consists of 20 nucleotides. In some embodiments, the spacer sequence of the disclosure comprises or consists of 21 nucleotides. In some embodiments, a scaffold or direct repeat sequence of the disclosure comprises or consists of between 10 and 100 nucleotides, inclusive of the endpoints. In some embodiments, a scaffold or direct repeat sequence of the disclosure comprises or consists of 30, 35, 40, 45, 50, 55, 60, 65, 70, 76, 80, 87, 90, 95, 100, or any number of nucleotides in between. In some embodiments, the scaffold or direct repeat sequence of the disclosure comprises or consists of between 85 and 95 nucleotides, inclusive of the endpoints. In some embodiments, the scaffold or direct repeat sequence of the disclosure comprises or consists of 85 nucleotides. In some embodiments, the scaffold or direct repeat sequence of the disclosure comprises or consists of 90 nucleotides. In some embodiments, the scaffold or direct repeat sequence of the disclosure comprises or consists of 93 nucleotides.

[0058] In some embodiments of the compositions of the disclosure, a capped-guide RNA or a portion thereof does not comprise a nuclear localization sequence (NLS).

[0059] In some embodiments of the compositions of the disclosure, a capped-guide RNA, or a portion thereof does not comprise a sequence complementary to a protospacer adjacent motif (PAM).

[0060] In some embodiments, therapeutic or pharmaceutical compositions of the disclosure do not include a PAMmer oligonucleotide. In other embodiments, optionally, non-therapeutic or non-pharmaceutical compositions may include a PAMmer oligonucleotide. In some embodiments of the compositions of the disclosure, a guide RNA or a portion thereof includes a sequence complementary to a protospacer flanking sequence (PFS). In some embodiments, including those wherein a guide RNA or a portion thereof includes a sequence complementary to a PFS, the RNA binding protein may include a sequence isolated or derived from a Cas protein, such as, without limitation, a Cas9, Cas13b, or Cas13d protein. In some embodiments, including those wherein a guide RNA or a portion thereof includes a sequence complementary to a PFS, the RNA binding protein may include a sequence encoding a Cas protein, such as, without limitation, a Cas9, Cas 13b, or Cas13d protein, or an RNA-binding portion thereof. In some embodiments, the guide RNA or a portion thereof does not comprise a sequence complementary to a PFS.

### Target RNA

[0061] The “target sequence” can be a stretch of nucleic acid sequences or a sequence motif present in an RNA molecule (e.g., mRNA) of interest to which a spacer sequence of the capped-sgRNA hybridizes, provided sufficient conditions for hybridization exist. Hybridization between the spacer and the target sequence is, for example, based on Watson-Crick base pairing rules, which enables programmability of the spacer sequence.

[0062] In one embodiment, the mRNA including the target sequence additionally includes one or more start codons and/or an endogenous m7G cap. In another embodiment, the target sequence is located downstream of an endogenous m7G cap, with its 5′ end located either upstream or downstream of a desired start codon. Any start codon in the target mRNA can be selected as the desired start codon. Upon hybridization between the spacer sequence of the capped-sgRNA and the target sequence, the m7G cap of the capped-sgRNA can be recruited to the vicinity of the desired start codon, and closer in proximity to the desired start codon than the endogenous m7G cap of the mRNA. In one embodiment, the m7G cap of the bound capped-sgRNA recruits translation initiation factors (e.g., EIF4E) and initiates protein translation from the desired start codon. In another embodiment, recruitment of the translation initiation factors occurs subsequent to the binding of the m7G cap of the capped-sgRNA. Without wishing to be bound by theory, the recruitment of an m7G cap via a capped-sgRNA to the vicinity of a desired start codon in a transcript allows for enhanced protein translation, as compared to protein translation initiated by the endogenous m7G cap of the transcript.

[0063] In one embodiment, the target sequence includes the desired start codon of the target mRNA. For example, the 5′ end of the target sequence can be upstream of the desired start codon and the 3′ end of the target sequence can be downstream of the desired start codon. In one embodiment, the 5′ end of the target sequence is located between 1 and 50 nucleotides (e.g., about 49, 48, 47, 46, 45, 44, 43, 42, 41, 40, 39, 38, 37, 36, 35, 34, 33, 32, 31, 30, 29, 28, 27, 26, 25, 24, 23, 22, 21, 20, 19, 18, 17, 16, 15, 14, 13, 12, 11, 10, 9, 8, 7, 6, 5, 4, 3, or 2 nucleotides) upstream of the first nucleotide of the desired start codon (e.g., an “A”). In another embodiment, the 5′ end of the target sequence is located between 1 and 50 nucleotides (e.g., about 49, 48, 47, 46, 45, 44, 43, 42, 41, 40, 39, 38, 37, 36, 35, 34, 33, 32, 31, 30, 29, 28, 27, 26, 25, 24, 23, 22, 21, 20, 19, 18, 17, 16, 15, 14, 13, 12, 11, 10, 9, 8, 7, 6, 5, 4, 3, or 2 nucleotides) downstream of the last nucleotide of the desired start codon. In some embodiments, the target sequence does not overlap with the desired start codon. The location ranges of the target sequence between about 1 and 50 nucleotides upstream or downstream of the desired start codon accounts for the differing structural properties of the various Cas proteins capable of being used with the capped-sgRNAs disclosed herein. In another embodiment, the target sequence is not required to be located between 1 and 50 nucleotides upstream or downstream from a desired start codon, rather the target sequence is located anywhere on the transcript. This is particularly relevant if the 5′UTR is large.

### Direct Repeat/Scaffold

[0064] The capped-sgRNA disclosed herein includes both a “spacer sequence” and a “direct repeat” (or “DR” or “direct repeat sequence” or “DR sequence”). In one embodiment, DR is comprised within a scaffold sequence which is capable of binding to a corresponding (or cognate) Cas polypeptide. In another embodiment, a DR is capable of binding to a corresponding (or cognate) Cas polypeptide. A direct repeat sequence disclosed herein is a repetitive sequence found within a CRISPR locus (naturally-occurring in a bacterial genome or plasmid). It is well known that one would be able to infer the DR sequence of a corresponding Cas protein if the sequence of the associated CRISPR locus is known.

[0065] Generally, a DR is a nucleic acid sequence that consists of two or more repeats of a specific sequence, i.e., nucleotide sequences present in multiple copies in the genome. A DR sequence may or may not have intervening nucleotides. In one embodiment, a DR sequence disclosed herein includes about 10 to about 100 nucleotides (e.g. about 12, 14, 16, 18, 20, 22, 24, 26, 28, 30, 32, 34, 36, 38, 40, 42, 44, 46, 48, 50, 52, 54, 56, 58, 60, 62, 64, 66, 68, 70, 72, 74, 76, 78, 80, 82, 84, 86, 88, 90, 92, 94, 96, or 98 nucleotides). In another embodiment, the DR sequence is orientated either 5′ or 3′ to a spacer within the sgRNA. In one embodiment, the direct repeat sequence is located 5′ to the spacer. In another embodiment, the DR sequence is located 3′ to the spacer.

[0066] Exemplary DR sequences for the capped-sgRNAs disclosed herein are shown below. Exemplary direct repeat sequences for Cas13a are SEQ ID Nos 284-298.

| | Cas13a | | |
|---|---|---|---|
| Cas13a | abbreviation | | |
| number | name | Organism | Direct Repeat sequence |
| Cas13a1 | LshCas13a | Leptotrichia | CCACCCCAATATCGAAGGGGACTAAAAC (SEQ ID |
| | | shahii | NO: 284) |
| Cas13a2 | LwaCas13a | Leptotrichia | GATTTAGACTACCCCAAAAACGAAGGGGACTAAAAC (SEQ |
| | | wadei | ID NO: 285) |
| Cas13a3 | LseCas13a | Listeria | GTAAGAGACTACCTCTATATGAAAGAGGACTAAAAC (SEQ |
| | | seeligeri | ID NO: 286) |
| Cas13a4 | LbmCas13a | Lachnospiraceae | GTATTGAGAAAAGCCAGATATAGTTGGCAATAGAC (SEQ ID |
| | | bacterium | NO: 287) |
| | | MA2020 | |
| Cas13a5 | LbnCas13a | Lachnospiraceae | GTTGATGAGAAGAGCCCAAGATAGAGGGCAATAAC (SEQ |
| | | bacterium | ID NO: 288) |
| | | NK4A179 | |
| Cas13a6 | CamCas13a | [Clostridium] | GTCTATTGCCCTCTATATCGGGCTGTTCTCCAAAC (SEQ ID |
| | | aminophilum | NO: 289) |
| | | DSM 10710 | |
| Cas13a7 | CgaCas13a | Carnobacterium | ATTAAAGACTACCTCTAAATGTAAGAGGACTATAAC (SEQ |
| | | gallinarum | ID NO: 290) |
| | | DSM 4847 | |
| Cas13a8 | Cga2Cas13a | Carnobacterium | AATATAAACTACCTCTAAATGTAAGAGGACTATAAC (SEQ |
| | | gallinarum | ID NO: 291) |
| | | DSM 4847 | |
| Cas13a9 | Pprcas13a | Paludibacter | CTTGTGGATTATCCCAAAATTGAAGGGAACTACAAC (SEQ |
| | | propionicigenes | ID NO: 292) |
| | | WB4 | |
| Cas13a10 | LweCas13a | Listeria | GATTTAGAGTACCTCAAAATAGAAGAGGTCTAAAAC (SEQ |
| | | weihen- | ID NO: 293) |
| | | stephanensis | |
| | | FSL R9-0317 | |
| Cas13a11 | LbfCas13a | Listeriaceae | GATTTAGAGTACCTCAAAACAAAAGAGGACTAAAAC (SEQ |
| | | bacterium FSL | ID NO: 294) |
| | | M6-0635 | |
| | | (Listeria | |
| | | newyorkensis) | |
| Cas13a12 | Lwa2cas13a | Leptotrichia | GATATAGATAACCCCAAAAACGAAGGGATCTAAAAC (SEQ |
| | | wadei F0279 | ID NO: 295) |
| Cas13a13 | RcsCas13a | Rhodobacter | GCCTCACATCACCGCCAAGACGACGGCGGACTGAAC (SEQ |
| | | capsulatus SB | ID NO: 296) |
| | | 1003 | |
| Cas13a14 | RcrCas13a | Rhodobacter | GCCTCACATCACCGCCAAGACGACGGCGGACTGAAC (SEQ |
| | | capsulatus | ID NO: 297) |
| | | R121 | |
| Cas13a15 | RcdCas13a | Rhodobacter | GCCTCACATCACCGCCAAGACGACGGCGGACTGAAC (SEQ |
| | | capsulatus | ID NO: 298) |
| | | DE442 | |

[0067] An exemplary Cas13b direct repeat sequence is:

(SEQ ID NO: 299)
GTTGTGGAAGGTCCAGTTTTGAGGGGCTATTACAAC

[0068] An exemplary Cas13d (contig e-k87_11092736) Direct Repeat Sequence is:

(SEQ ID NO: 300)
GTGAGAAGTCTCCTTATGGGGAGATGCTAC

[0069] An exemplary Cas13d (160582958_gene49834) Direct Repeat Sequence is:

(SEQ ID NO: 301)
GAACTACACCCCTCTGTTCTTGTAGGGGTCTAACAC

[0070] Additional exemplary Cas13d Direct Repeat sequences are:

(SEQ ID NO: 302)
CACCCGTGCAAAATTGCAGGGGTCTAAAAC
(SEQ ID NO: 303)
GACCAACACCTCTGCAAAACTGCAGGGGTCTAAAAC
(SEQ ID NO: 304)
AACCCCTACCAACTGGTCGGGGTTTGAAAC

[0071] An exemplary scaffold sequence for Cas9 is:

(SEQ ID NO: 305)
TTTAAGAGCTATGCTGGAAACAGCATAGCAAGTTTAAATAAGGCTAGTCC
GTTATCAACTTGAAAAAGTGGCACCGAGTCGGTGC

[0072] Scaffold/DR sequences of the disclosure bind the CRISPR/Cas RNA-binding protein of the disclosure. Scaffold/DR sequences of the disclosure may include a trans acting RNA (tracrRNA). Upon binding to a target sequence of an RNA molecule, the scaffold/DR sequence guides a fusion protein to the RNA molecule. In some embodiments, a scaffold/DR sequence having sufficient complementarity to a target sequence of an RNA molecule to bind selectively (partially or substantially) to the target sequence has at least 50%, 55%, 60%, 65%, 70%, 75%, 80%, 85%, 90%, 95%, 96, 97%, 98%, 99%, or any percentage identity in between to the target sequence. In some embodiments, a scaffold/DR sequence having sufficient complementarity to a target sequence of an RNA molecule to bind selectively to the target sequence has 100% identity the target sequence. In some embodiments, scaffold/DR sequences of the disclosure comprise a secondary structure or a tertiary structure. Exemplary secondary structures include, but are not limited to, a helix, a stem loop, a bulge, a tetraloop and a pseudo not. Exemplary tertiary structures include, but are not limited to, an A-form of a helix, a B-form of a helix, and a Z-form of a helix. Exemplary tertiary structures include, but are not limited to, a twisted or helicized stem loop. Exemplary tertiary structures include, but are not limited to, a twisted or helicized pseudoknot. In some embodiments, scaffold/DR sequences of the disclosure comprise at least one secondary structure or at least one tertiary structure. In some embodiments, scaffold/DR sequences of the disclosure include one or more secondary structure(s) or one or more tertiary structure(s).

### Linker

[0073] The capped-sgRNA disclosed herein can include a “linker” or “linker sequence” between the m7G cap or analog thereof and the spacer and/or DR sequences. In one embodiment, the linker sequence includes about 5 to about 25 nucleotides (e.g., about 6, 7, 8, 9, 10, 11, 12, 13, 14, 15, 16, 17, 18, 19, 20, 21, 22, 23, or 24 nucleotides). In another embodiment, the linker sequence is non-complementary to any sequence within the RNA molecule comprising the target sequence. Exemplary sequences for such a linker include, without limitation: GTCAGATCG (SEQ ID NO: 306), GTCAGATCGCCT (SEQ ID NO: 307), GTCAGATCGCCTGGA (SEQ ID NO: 308), and GTCAGATCGCCTGGAATT (SEQ ID NO: 309). Any suitable linker sequences known in the art are also contemplated herein. In some embodiments, the linker sequence is modified to adjust the editing window.

### RNase P Processing Site

[0074] Some embodiments provide a nucleic acid encoding the capped-sgRNA described herein, where an unprocessed capped-sgRNA is first generated upon transcription of the nucleic acid. In one embodiment, an unprocessed capped-sgRNA includes an RNase P processing site, which is downstream of the spacer and/or direct repeat and upstream of a poly-A tail. In this manner, an RNase P binds to the processing site and removes the downstream sequence (e.g., the poly-A tail) to generate a capped-sgRNA disclosed herein. Exemplary RNase P processing sites can be found at Esakova and Krasilnikov, RNA 16:1725-1747, 2010 (e.g., See FIG. 1 of Esakova and Krasilnikov), incorporated herein by reference in its entirety. The RNase P processing site is known to include elements recognizable by RNase P, such as those described in Kirseborn et al. Biochimie 89: 1183-1194, 2007 and Lai et al. FEBS Left 584: 287-296, 2010, both of which are incorporated herein by reference in their entirety. For example, the RNase P processing site can include all or a portion of a bacterial (e.g., E. coli) pre-tRNA, 4.5S rRNA precursor, or yeast pre-rRNA that includes an RNase cleavage site. Structures that resemble tmRNA, operon mRNAs, phage RNAs, OLE RNA from extremophilic bacteria are also contemplated herein as RNase P processing sites. All or a portion of a viral non-tRNA such as TYMV RNA are also useful as RNase P processing sites. In some embodiments, an RNase P processing site includes a tRNA-like small RNA (e.g., GenBank Accession No. FJ209302).

[0075] An exemplary structure of an unprocessed capped-sgRNA is shown in FIG. 1B. In this embodiment, the unprocessed capped-sgRNA includes from 5′ to 3′: an m7G cap, a linker, a spacer, a direct repeat, an RNase P processing site, and a poly-A tail. In another embodiment, the RNase P processing site and poly-A tail is removed upon RNase P processing, thereby generating the capped-sgRNA with the structure of FIG. 1C, wherein a′ is a guanosine or adenine, b′ is a spacer sequence and c′ is a direct repeat sequence.

### III. CRISPR/Cas Polypeptides

[0076] The capped-sgRNAs disclosed herein are capable of binding with their cognate or corresponding RNA-binding CRISPR/Cas polypeptides (e.g., via a direct repeat sequence in the capped-sgRNA). In one embodiment, the capped-sgRNA includes a spacer sequence that confers target specificity to the Cas/sgRNA complex. CRISPR/Cas polypeptides are well known in the art and any particular Cas polypeptide can be adapted for use in the capped-sgRNA systems disclosed herein. In some embodiments, the Cas polypeptides for use as disclosed herein have altered activity compared to its corresponding wild type Cas polypeptide. In some embodiments, the Cas polypeptides are nuclease-deficient Cas (dCas) polypeptides. Nuclease-deficient Cas polypeptides have altered (e.g., diminished or abolished) nuclease activity without substantially diminished binding affinity to the sgRNA. These Cas polypeptides are useful, for example, in mediating the direct association between the capped-sgRNA and the target mRNA, and in protecting the 3′ end of the capped-sgRNA from degradation. In some embodiments, the dCas for use with the capped-sgRNA disclosed herein is devoid of cleavage activity that is applicable to the target RNA. In some embodiments, the dCas polypeptide for use with the capped-sgRNA disclosed herein retains cleavage activity that is applicable to the capped-sgRNA. In some embodiments, the dCas13 comprises an inactivated target cleavage domain and a retained or partially retained (i.e., activated or partially activated) guide cleavage domain.

[0077] In one embodiment, the Cas polypeptide is Cas13b. In another embodiment, the Cas polypeptide is dead or nuclease deficient Cas13b (dCas13b). In another embodiment, the dCas13b comprises an inactivated target cleavage domain and a retained (i.e., activated) guide cleavage domain as exemplified in FIGS. 1B and 1D. In one embodiment, the Cas polypeptide disclosed herein is a Type II CRISPR Cas protein. In some embodiments, the Type II CRISPR Cas protein includes a Cas9 protein. Exemplary Cas9 proteins of the disclosure may be isolated or derived from any species, including, but not limited to, bacteria or archaea. Exemplary Cas9 proteins of the disclosure may be isolated or derived from any species, including, but not limited to, Streptococcus pyogenes, Haloferax mediteranii, Mycobacterium tuberculosis, Francisella tularensis subsp. novicida, Pasteurella multocida, Neisseria meningitidis, Campylobacter jejune, Streptococcus thermophilus, Campylobacter lari CF89-12, Mycoplasma gallisepticum str. F, Nitratifractor salsuginis str. DSM 16511, Parvibaculum lavamentivorans, Roseburia intestinalis, Neisseria cinerea, a Gluconacetobacter diazotrophicus, an Azospirillum B510, a Sphaerochaeta globus str. Buddy, Flavobacterium columnare, Fluviicola taffensis, Bacteroides coprophilus, Mycoplasma mobile, Lactobacillus farciminis, Streptococcus pasteurianus, Lactobacillus johnsonii, Staphylococcus pseudintermedius, Filifactor alocis, Treponema denticola, Legionella pneumophila str. Paris, Sutterella wadsworthensis, Corynebacter diphtherias, Streptococcus aureus, and Francisella novicida.

[0078] Some embodiments of the capped-sgRNA compositions or methods disclosed herein provide a Cas9 polypeptide. In certain embodiments, the Cas9 polypeptide lacks part or all of the nuclease domains (e.g., the RuvC and/or HNH domains) of a wild type Cas9 polypeptide, and therefore are nuclease-deficient. These truncated Cas9 polypeptides have a smaller size as compared to a wild type Cas9. The RuvC and HNH nuclease domains can also be inactivated, for example, as a result of point mutations within these domains. For instance, D10A and H840A mutations in Streptococcus pyogenes Cas9 (SpCas9) results in nuclease-deficient SpCas9. An exemplary sequence of a nuclease-deficient SpCas9 is SEQ ID NO: 310. The RuvC domain is distributed among 3 non-contiguous portions of the nuclease-deficient Cas9 primary structure (residues 1-60, 719-775, and 910-1099). The HNH domain is composed of residues 776-909.

```
SEQ ID NO: 310
(SEQ ID NO: 310)
Arg Thr Met Asp Lys Lys Tyr Ser Ile Gly Leu Ala Ile Gly Thr Asn
1 5 10 15
Ser Val Gly Trp Ala Val Ile Thr Asp Glu Tyr Lys Val Pro Ser Lys
                        20 25 30
Lys Phe Lys Val Leu Gly Asn Thr Asp Arg His Ser Ile Lys Lys Asn
                35 40 45
Leu Ile Gly Ala Leu Leu Phe Asp Ser Gly Glu Thr Ala Glu Ala Thr
        50 55 60
Arg Leu Lys Arg Thr Ala Arg Arg Arg Tyr Thr Arg Arg Lys Asn Arg
65 70 75 80
Ile Cys Tyr Leu Gln Glu Ile Phe Ser Asn Glu Met Ala Lys Val Asp
                                85 90 95
Asp Ser Phe Phe His Arg Leu Glu Glu Ser Phe Leu Val Glu Glu Asp
                        100 105 110
Lys Lys His Glu Arg His Pro Ile Phe Gly Asn Ile Val Asp Glu Val
                115 120 125
Ala Tyr His Glu Lys Tyr Pro Thr Ile Tyr His Leu Arg Lys Lys Leu
        130 135 140
Val Asp Ser Thr Asp Lys Ala Asp Leu Arg Leu Ile Tyr Leu Ala Leu
145 150 155 160
Ala His Met Ile Lys Phe Arg Gly His Phe Leu Ile Glu Gly Asp Leu
                                165 170 175
Asn Pro Asp Asn Ser Asp Val Asp Lys Leu Phe Ile Gln Leu Val Gln
                        180 185 190
Thr Tyr Asn Gln Leu Phe Glu Glu Asn Pro Ile Asn Ala Ser Gly Val
                195 200 205
Asp Ala Lys Ala Ile Leu Ser Ala Arg Leu Ser Lys Ser Arg Arg Leu
        210 215 220
Glu Asn Leu Ile Ala Gln Leu Pro Gly Glu Lys Lys Asn Gly Leu Phe
225 230 235 240
Gly Asn Leu Ile Ala Leu Ser Leu Gly Leu Thr Pro Asn Phe Lys Ser
                                245 250 255
Asn Phe Asp Leu Ala Glu Asp Ala Lys Leu Gln Leu Ser Lys Asp Thr
                        260 265 270
Tyr Asp Asp Asp Leu Asp Asn Leu Leu Ala Gln Ile Gly Asp Gln Tyr
                275 280 285
Ala Asp Leu Phe Leu Ala Ala Lys Asn Leu Ser Asp Ala Ile Leu Leu
        290 295 300
Ser Asp Ile Leu Arg Val Asn Thr Glu Ile Thr Lys Ala Pro Leu Ser
305 310 315 320
Ala Ser Met Ile Lys Arg Tyr Asp Glu His His Gln Asp Leu Thr Leu
                                325 330 335
Leu Lys Ala Leu Val Arg Gln Gln Leu Pro Glu Lys Tyr Lys Glu Ile
                        340 345 350
Phe Phe Asp Gln Ser Lys Asn Gly Tyr Ala Gly Tyr Ile Asp Gly Gly
                355 360 365
Ala Ser Gln Glu Glu Phe Tyr Lys Phe Ile Lys Pro Ile Leu Glu Lys
        370 375 380
Met Asp Gly Thr Glu Glu Leu Leu Val Lys Leu Asn Arg Glu Asp Leu
385 390 395 400
Leu Arg Lys Gln Arg Thr Phe Asp Asn Gly Ser Ile Pro His Gln Ile
                                405 410 415
His Leu Gly Glu Leu His Ala Ile Leu Arg Arg Gln Glu Asp Phe Tyr
                        420 425 430
Pro Phe Leu Lys Asp Asn Arg Glu Lys Ile Glu Lys Ile Leu Thr Phe
                435 440 445
Arg Ile Pro Tyr Tyr Val Gly Pro Leu Ala Arg Gly Asn Ser Arg Phe
        450 455 460
Ala Trp Met Thr Arg Lys Ser Glu Glu Thr Ile Thr Pro Trp Asn Phe
465 470 475 480
Glu Glu Val Val Asp Lys Gly Ala Ser Ala Gln Ser Phe Ile Glu Arg
                                485 490 495
Met Thr Asn Phe Asp Lys Asn Leu Pro Asn Glu Lys Val Leu Pro Lys
                        500 505 510
His Ser Leu Leu Tyr Glu Tyr Phe Thr Val Tyr Asn Glu Leu Thr Lys
                515 520 525
Val Lys Tyr Val Thr Glu Gly Met Arg Lys Pro Ala Phe Leu Ser Gly
        530 535 540
Glu Gln Lys Lys Ala Ile Val Asp Leu Leu Phe Lys Thr Asn Arg Lys
545 550 555 560
Val Thr Val Lys Gln Leu Lys Glu Asp Tyr Phe Lys Lys Ile Glu Cys
                                565 570 575
Phe Asp Ser Val Glu Ile Ser Gly Val Glu Asp Arg Phe Asn Ala Ser
                        580 585 590
Leu Gly Thr Tyr His Asp Leu Leu Lys Ile Ile Lys Asp Lys Asp Phe
                595 600 605
Leu Asp Asn Glu Glu Asn Glu Asp Ile Leu Glu Asp Ile Val Leu Thr
        610 615 620
Leu Thr Leu Phe Glu Asp Arg Glu Net Ile Glu Glu Arg Leu Lys Thr
625 630 635 640
Tyr Ala His Leu Phe Asp Asp Lys Val Met Lys Gln Leu Lys Arg Arg
                                645 650 655
Arg Tyr Thr Gly Trp Gly Arg Leu Ser Arg Lys Leu Ile Asn Gly Ile
                        660 665 670
Arg Asp Lys Gln Ser Gly Lys Thr Ile Leu Asp Phe Leu Lys Ser Asp
                675 680 685
Gly Phe Ala Asn Arg Asn Phe Met Gln Leu Ile His Asp Asp Ser Leu
        690 695 700
Thr Phe Lys Glu Asp Ile Gln Lys Ala Gln Val Ser Gly Gln Gly Asp
705 710 715 720
Ser Leu His Glu His Ile Ala Asn Leu Ala Gly Ser Pro Ala Ile Lys
                                725 730 735
Lys Gly Ile Leu Gln Thr Val Lys Val Val Asp Glu Leu Val Lys Val
                        740 745 750
Met Gly Arg His Lys Pro Glu Asn Ile Val Ile Glu Met Ala Arg Glu
                755 760 765
Asn Gln Thr Thr Gln Lys Gly Gln Lys Asn Ser Arg Glu Arg Met Lys
        770 775 780
Arg Ile Glu Glu Gly Ile Lys Glu Leu Gly Ser Gln Ile Leu Lys Glu
785 790 795 800
His Pro Val Glu Asn Thr Gln Leu Gln Asn Glu Lys Leu Tyr Leu Tyr
                                805 810 815
Tyr Leu Gln Asn Gly Arg Asp Met Tyr Val Asp Gln Glu Leu Asp Ile
                        820 825 830
Asn Arg Leu Ser Asp Tyr Asp Val Asp Ala Ile Val Pro Gln Ser Phe
                835 840 845
Leu Lys Asp Asp Ser Ile Asp Asn Lys Val Leu Thr Arg Ser Asp Lys
        850 855 860
Asn Arg Gly Lys Ser Asp Asn Val Pro Ser Glu Glu Val Val Lys Lys
865 870 875 880
Met Lys Asn Tyr Trp Arg Gln Leu Leu Asn Ala Lys Leu Ile Thr Gln
                                885 890 895
Arg Lys Phe Asp Asn Leu Thr Lys Ala Glu Arg Gly Gly Leu Ser Glu
                        900 905 910
Leu Asp Lys Ala Gly Phe Ile Lys Arg Gln Leu Val Glu Thr Arg Gln
                915 920 925
Ile Thr Lys His Val Ala Gln Ile Leu Asp Ser Arg Met Asn Thr Lys
        930 935 940
Tyr Asp Glu Asn Asp Lys Leu Ile Arg Glu Val Lys Val Ile Thr Leu
945 950 955 960
Lys Ser Lys Leu Val Ser Asp Phe Arg Lys Asp Phe Gln Phe Tyr Lys
                                965 970 975
Val Arg Glu Ile Asn Asn Tyr His His Ala His Asp Ala Tyr Leu Asn
                        980 985 990
Ala Val Val Gly Thr Ala Leu Ile Lys Lys Tyr Pro Lys Leu Glu Ser
                995 1000 1005
Glu Phe Val Tyr Gly Asp Tyr Lys Val Tyr Asp Val Arg Lys Met Ile
        1010 1015 1020
Ala Lys Ser Glu Gln Glu Ile Gly Lys Ala Thr Ala Lys Tyr Phe Phe
1025 1030 1035 1040
Tyr Ser Asn Ile Met Asn Phe Phe Lys Thr Glu Ile Thr Leu Ala Asn
                                1045 1050 1055
Gly Glu Ile Arg Lys Arg Pro Leu Ile Glu Thr Asn Gly Glu Thr Gly
                        1060 1065 1070
Glu Ile Val Trp Asp Lys Gly Arg Asp Phe Ala Thr Val Arg Lys Val
                1075 1080 1085
Leu Ser Met Pro Gln Val Asn Ile Val Lys Lys Thr Glu Val Gln Thr
        1090 1095 1100
Gly Gly Phe Ser Lys Glu Ser Ile Leu Pro Lys Arg Asn Ser Asp Lys
1105 1110 1115 1120
Leu Ile Ala Arg Lys Lys Asp Trp Asp Pro Lys Lys Tyr Gly Gly Phe
                                1125 1130 1135
Asp Ser Pro Thr Val Ala Tyr Ser Val Leu Val Val Ala Lys Val Glu
                        1140 1145 1150
Lys Gly Lys Ser Lys Lys Leu Lys Ser Val Lys Glu Leu Leu Gly Ile
                1155 1160 1165
Thr Ile Met Glu Arg Ser Ser Phe Glu Lys Asn Pro Ile Asp Phe Leu
        1170 1175 1180
Glu Ala Lys Gly Tyr Lys Glu Val Lys Lys Asp Leu Ile Ile Lys Leu
1185 1190 1195 1200
Pro Lys Tyr Ser Leu Phe Glu Leu Glu Asn Gly Arg Lys Arg Met Leu
                                1205 1210 1215
Ala Ser Ala Gly Glu Leu Gln Lys Gly Asn Glu Leu Ala Leu Pro Ser
                        1220 1225 1230
Lys Tyr Val Asn Phe Leu Tyr Leu Ala Ser His Tyr Glu Lys Leu Lys
                1235 1240 1245
Gly Ser Pro Glu Asp Asn Glu Gln Lys Gln Leu Phe Val Glu Gln His
        1250 1255 1260
Lys His Tyr Leu Asp Glu Ile Ile Glu Gln Ile Ser Glu Phe Ser Lys
1265 1270 1275 1280
Arg Val Ile Leu Ala Asp Ala Asn Leu Asp Lys Val Leu Ser Ala Tyr
                                1285 1290 1295
Asn Lys His Arg Asp Lys Pro Ile Arg Glu Gln Ala Glu Asn Ile Ile
                        1300 1305 1310
His Leu Phe Thr Leu Thr Asn Leu Gly Ala Pro Ala Ala Phe Lys Tyr
                1315 1320 1325
Phe Asp Thr Thr Ile Asp Arg Lys Arg Tyr Thr Ser Thr Lys Glu Val
        1330 1335 1340
Leu Asp Ala Thr Leu Ile His Gln Ser Ile Thr Gly Leu Tyr Glu Thr
1345 1350 1355 1360
Arg Ile Asp Leu Ser Gln Leu Gly Gly Asp Ala Tyr Pro Tyr Asp Val
                                1365 1370 1375
Pro Asp Tyr Ala Ser Leu
```

[0079] Some embodiments provide a Cas polypeptide that is a Cas9 polypeptide that lacks all or a part of (1) an HNH domain, (2) at least one RuvC nuclease domain, (3) a Cas9 polypeptide DNase active site, (4) a ββα-metal fold comprising a Cas9 polypeptide active site, or (5) a Cas9 polypeptide that lacks all or part of one or more of the HNH domain, at least one RuvC nuclease domain, a Cas9 polypeptide DNase active site, and/or a ββα-metal fold comprising a Cas9 polypeptide active site as compared to a corresponding wild type Cas9 polypeptide.

[0080] The Cas9 polypeptides described herein can be archaeal or bacterial Cas9 polypeptides. Exemplary Cas9 polypeptide include those derived from Haloferax mediteranii, Mycobacterium tuberculosis, Francisella tularensis subsp. novicida, Pasteurella multocida, Neisseria meningitidis, Campylobacter jejune, Streptococcus thermophilus LMD-9 CRISPR 3, Campylobacter lari CF89-12, Mycoplasma gallisepticum str. F, Nitratifractor salsuginis str. DSM 1651 1, Parvibaculum lavamentivorans, Roseburia intestinalis, Neisseria cinerea, Gluconacetobacter diazotrophicus, Azospirillum B510, Sphaerochaeta globus str. Buddy, Flavobacterium columnare, Fluviicola taffensis, Bacteroides coprophilus, Mycoplasma mobile, Lactobacillus farciminis, Streptococcus pasteurianus, Lactobacillus johnsonii, Staphylococcus pseudintermedius, Filif actor alocis, Treponema denticola, Legionella pneumophila str. Paris, Sutterella wadsworthensis, Corynebacter diphtheriae, Streptococcus aureus, and Francisella novicida.

[0081] Any Cas polypeptides with altered nuclease activity as compared to a naturally occurring Cas polypeptide is contemplated herein. Additional types of nuclease-deficient Cas polypeptides are described in e.g., Brezgin et al. Int J Mol Sci 20(23):6041, 2019 and Xu and Lei, J Mol Biol 431:34-47, 2019, incorporated by reference in its entirety.

[0082] Exemplary Cas polypeptide sequences disclosed in the methods for translational enhancement WO2019/204828 are incorporated herein by reference in their entirety and can be used in conjunction with the corresponding capped-sgRNAs disclosed herein.

[0083] In some embodiments of the compositions of the disclosure, the CRISPR Cas protein comprises a Type V CRISPR Cas protein. In some embodiments, the Type V CRISPR Cas protein comprises a Cpf1 protein. Exemplary Cpf1 proteins of the disclosure may be isolated or derived from any species, including but not limited to, bacteria or archaea. Exemplary Cpf1 proteins of the disclosure may be isolated or derived from any species, including but not limited to, Francisella tularensis subsp. novicida, Acidaminococcus sp. BV3L6 and Lachnospiraceae bacterium sp. ND2006. Exemplary Cpf1 proteins of the disclosure may be nuclease inactivated.

[0084] In some embodiments, the CRISPR Cas protein comprises a Type VI CRISPR Cas protein or portion thereof. In some embodiments, the Type VI CRISPR Cas protein comprises a Cas13 protein or portion thereof. Exemplary Cas13 proteins of the disclosure may be isolated or derived from any species, including, but not limited to, bacteria or archaea. Exemplary Cas13 proteins of the disclosure may be isolated or derived from any species, including, but not limited to, Leptotrichia wadei, Listeria seeligeri serovar 1/2b (strain ATCC 35967/DSM 20751/CIP 100100/SLCC 3954), Lachnospiraceae bacterium, Clostridium aminophilum DSM 10710, Carnobacterium gallinarum DSM 4847, Paludibacter propionicigenes WB4, Listeria weihenstephanensis FSL R9-0317, Listeria weihenstephanensis FSL R9-0317, bacterium FSL M6-0635 (Listeria newyorkensis), Leptotrichia wadei F0279, Rhodobacter capsulatus SB 1003, Rhodobacter capsulatus R121, Rhodobacter capsulatus DE442 and Corynebacterium ulcerans. Exemplary Cas13 proteins of the disclosure may be DNA nuclease inactivated. Exemplary Cas13 proteins of the disclosure include, but are not limited to, Cas13a, Cas13b, Cas13c, Cas13d, and orthologs thereof. Exemplary Cas13b proteins of the disclosure include, but are not limited to, subtypes 1 and 2 referred to herein as Csx27 and Csx28, respectively.

[0085] In some embodiments of the compositions of the disclosure, the sequence encoding the RNA binding protein comprises a sequence isolated or derived from a Cas13d protein or also called CasRx/Cas13d proteins. CasRX/Cas13d is an effector of the type VI-D CRISPR-Cas systems. In some embodiments, the CasRX/Cas13d protein is an RNA-guided RNA endonuclease enzyme that can cut or bind RNA. In some embodiments, the CasRX/Cas13d protein can include one or more higher eukaryotes and prokaryotes nucleotide-binding (HEPN) domains. In some embodiments, the CasRX/Cas13d protein can include either a wild-type or mutated HEPN domain. In some embodiments, the CasRX/Cas13d protein includes a mutated HEPN domain that cannot cut RNA but can process guide RNA. In some embodiments, the CasRX/Cas13d protein does not require a protospacer flanking sequence. Also see WO Publication No. WO2019/040664 & US2019/0062724, which is incorporated herein by reference in its entirety, for further examples and sequences of CasRX/Cas13d protein.

[0086] In some instances, the Cas polypeptide has a sequence that is at least 80% identical (e.g. at least 82%, 84%, 86%, 88%, 90%, 92%, 94%, 96%, 98%, or 99% identical) to any of the Cas polypeptides (e.g., any of the wild type or nuclease-deficient Cas polypeptides) of the present disclosure.

[0087] Exemplary Cas9 sequences include, but are not limited to:

| Name | Protein Sequence |
|---|---|
| S. pyogenes Cas9 | MDKKYSIGLDIGINSVGWAVITDEYKVPSKKFKVLGNTDRHSIKKNLIGALLFDSGETA |
| | EATRLKRTARRRYTRRKNRICYLQEIFSNEMAKVDDSFFHRLEESFLVEEDKKHERHPI |
| | FGNIVDEVAYHEKYPTIYHLRKKLVDSTDKADLRLIYLALAHMIKFRGHFLIEGDLNPD |
| | NSDVDKLFIQLVQTYNQLFEENPINASGVDAKAILSARLSKSRRLENLIAQLPGEKKNG |
| | LFGNLIALSLGLTPNFKSNFDLAEDAKLQLSKDTYDDDLDNLLAQIGDQYADLFLAAK |
| | NLSDAILLSDILRVNTEITKAPLSASMIKRYDEHHQDLTLLKALVRQQLPEKYKEIFFDQ |
| | SKNGYAGYIDGGASQEEFYKFIKPILEKMDGTEELLVKLNREDLLRKQRTFDNGSIPHQ |
| | IHLGELHAILRRQEDFYPFLKDNREKIEKILTFRIPYYVGPLARGNSRFAWMTRKSEETIT |
| | PWNFEEVVDKGASAQSFIERMTNFDKNLPNEKVLPKHSLLYEYFTVYNELTKVKYVTE |
| | GMRKPAFLSGEQKKAIVDLLFKTNRKVTVKQLKEDYFKKIECFDSVEISGVEDRFNASL |
| | GTYHDLLKIIKDKDFLDNEENEDILEDIVLTLTLFEDREMIEERLKTYAHLFDDKVMKQ |
| | LKRRRYTGWGRLSRKLINGIRDKQSGKTILDFLKSDGFANRNFMQLIHDDSLTFKEDIQ |
| | KAQVSGQGDSLHEHIANLAGSPAIKKGILQTVKVVDELVKVMGRHKPENIVIEMAREN |
| | QTTQKGQKNSRERMKRIEEGIKELGSQILKEHPVENTQLQNEKLYLYYLQNGRDMYV |
| | DQELDINRLSDYDVDHIVPQSFLKDDSIDNKVLTRSDKNRGKSDNVPSEEVVKKMKNY |
| | WRQLLNAKLITQRKFDNLTKAERGGLSELDKAGFIKRQLVETRQITKHVAQILDSRMN |
| | TKYDENDKLIREVKVITLKSKLVSDFRKDFQFYKVREINNYHHAHDAYLNAVVGTALI |
| | KKYPKLESEFVYGDYKVYDVRKMIAKSEQEIGKATAKYFFYSNIMNFFKTEITLANGEI |
| | RKRPLIETNGETGEIVWDKGRDFATVRKVLSMPQVNIVKKTEVQTGGFSKESILPKRNS |
| | DKLIARKKDWDPKKYGGFDSPTVAYSVLVVAKVEKGKSKKLKSVKELLGITIMERSSF |
| | EKNPIDFLEAKGYKEVKKDLIIKLPKYSLFELENGRKRMLASAGELQKGNELALPSKYV |
| | NFLYLASHYEKLKGSPEDNEQKQLFVEQHKHYLDEIIEQISEFSKRVILADANLDKVLS |
| | AYNKHRDKPIREQAENIIHLFTLTNLGAPAAFKYFDTTIDRKRYTSTKEVLDATLIHQSI |
| | TGLYETRIDLSQLGGD (SEQ ID NO: 311) |
| Staphylococcus | MKRNYILGLDIGITSVGYGIIDYETRDVIDAGVRLFKEANVENNEGRRSKRGARRLKRR |
| aureus Cas9 | RRHRIQRVKKLLFDYNLLTDHSELSGINPYEARVKGLSQKLSEEEFSAALLHLAKRRGV |
| | HNVNEVEEDTGNELSTKEQISRNSKALEEKYVAELQLERLKKDGEVRGSINRFKTSDY |
| | VKEAKQLLKVQKAYHQLDQSFIDTYIDLLETRRTYYEGPGEGSPFGWKDIKEWYEML |
| | MGHCTYFPEELRSVKYAYNADLYNALNDLNNLVITRDENEKLEYYEKFQIIENVFKQK |
| | KKPTLKQIAKEILVNEEDIKGYRVTSTGKPEFTNLKVYHDIKDITARKEIIENAELLDQIA |
| | KILTIYQSSEDIQEELTNLNSELTQEEIEQISNLKGYTGTHNLSLKAINLILDELWHTNDN |
| | QIAIFNRLKLVPKKVDLSQQKEIPTTLVDDFILSPVVKRSFIQSIKVINAIIKKYGLPNDIII |
| | ELAREKNSKDAQKMINEMQKRNRQTNERIEEIIRTTGKENAKYLIEKIKLHDMQEGKC |
| | LYSLEAIPLEDLLNNPFNYEVDHIIPRSVSFDNSFNNKVLVKQEENSKKGNRTPFQYLSS |
| | SDSKISYETFKKHILNLAKGKGRISKTKKEYLLEERDINRFSVQKDFINRNLVDTRYATR |
| | GLMNLLRSYFRVNNLDVKVKSINGGFTSFLRRKWKFKKERNKGYKHHAEDALIIANA |
| | DFIFKEWKKLDKAKKVMENQMFEEKQAESMPEIETEQEYKEIFITPHQIKHIKDFKDYK |
| | YSHRVDKKPNRELINDTLYSTRKDDKGNTLIVNNLNGLYDKDNDKLKKLINKSPEKLL |
| | MYHHDPQTYQKLKLIMEQYGDEKNPLYKYYEETGNYLTKYSKKDNGPVIKKIKYYGN |
| | KLNAHLDITDDYPNSRNKVVKLSLKPYRFDVYLDNGVYKFVTVKNLDVIKKENYYEV |
| | NSKCYEEAKKLKKISNQAEFIASFYNNDLIKINGELYRVIGVNNDLLNRIEVNMIDITYR |
| | EYLENIVINDKRPPRIIKTIASKTQSIKKYSTDILGNLYEVKSKKHPQIIKKG (SEQ ID NO: |
| | 312) |
| S. thermophilus | MSDLVLGLDIGIGSVGVGILNKVTGEIIHKNSRIFPAAQAENNLVRRTNRQGRRLARRK |
| CRISPR 1 Cas9 | KHRRVRLNRLFEESGLITDFTKISINLNPYQLRVKGLTDELSNEELFIALKNMVKHRGIS |
| | YLDDASDDGNSSVGDYAQIVKENSKQLETKTPGQIQLERYQTYGQLRGDFTVEKDGK |
| | KHRLINVFPTSAYRSEALRILQTQQEFNPQITDEFINRYLEILTGKRKYYHGPGNEKSRT |
| | DYGRYRTSGETLDNIEGILIGKCTFYPDEFRAAKASYTAQEFNLLNDLNNLTVPTETKK |
| | LSKEQKNQIINYVKNEKAMGPAKLFKYIAKLLSCDVADIKGYRIDKSGKAEIHTFEAYR |
| | KMKTLETLDIEQMDRETLDKLAYVLTLNTEREGIQEALEHEFADGSFSQKQVDELVQF |
| | RKANSSIFGKGWHNFSVKLMMELIPELYETSEEQMTILTRLGKQKTTSSSNKTKYIDEK |
| | LLTEEIYNPVVAKSVRQAIKIVNAAIKEYGDFDNIVIEMARETNEDDEKKAIQKIQKAN |
| | KDEKDAAMLKAANQYNGKAELPHSVFHGHKQLATKIRLWHQQGERCLYTGKTISIHD |
| | LINNSNQEENDHILPLSITFDDSLANKVLVYATANQEKGQRTPYQALDSMDDAWSERE |
| | LKAFVRESKTLSNKKKEYLLTEEDISKFDVRKKFIERNLVDTRYASRVVLNALQEHFRA |
| | HKIDTKVSVVRGQFTSQLRRHWGIEKTRDTYHHHAVDALIIAASSQLNLWKKQKNTL |
| | VSYSEDQLLDIETGELISDDEYKESVFKAPYQHFVDTLKSKEFEDSILFSYQVDSKFNRK |
| | ISDATIYATRQAKVGKDKADETYVLGKIKDIYTQDGYDAFMKIYKKDKSKFLMYRHD |
| | PQTFEKVIEPILENYPNKQINDKGKEVPCNPFLKYKEEHGYIRKYSKKGNGPEIKSLKYY |
| | DSKLGNHIDITPKDSNNKVVLQSVSPWRADVYFNKTTGKYEILGLKYADLQFDKGTGT |
| | YKISQEKYNDIKKKEGVDSDSEFKFTLYKNDLLLVKDTETKEQQLFRFLSRTMPKQKH |
| | YVELKPYDKQKFEGGEALIKVLGNVANSGQCKKGLGKSNISIYKVRTDVLGNQHIIKN |
| | EGDKPKLDF (SEQ ID NO: 313) |
| N. meningitidis Cas9 | MAAFKPNPINYILGLDIGIASVGWAMVEIDEDENPICLIDLGVRVFERAEVPKTGDSLA |
| | MARRLARSVRRLTRRRAHRLLRARRLLKREGVLQAADFDENGLIKSLPNTPWQLRAA |
| | ALDRKLTPLEWSAVLLHLIKHRGYLSQRKNEGETADKELGALLKGVADNAHALQTGD |
| | FRIPAELALNKEEKESGHIRNQRGDYSHTFSRKDLQAELILLFEKQKEFGNPHVSGGLK |
| | EGIETLLMTQRPALSGDAVQKMLGHCTFEPAEPKAAKNTYTAERFIWLTKLNNLRILE |
| | QGSERPLTDTERATLMDEPYRKSKLTYAQARKLLGLEDTAFFKGLRYGKDNAEASTL |
| | MEMKAYHAISRALEKEGLKDKKSPLNLSPELQDEIGTAFSLFKTDEDITGRLKDRIQPEI |
| | LEALLKHISFDKFVQISLKALRRIVPLMEQGKRYDEACAEIYGDHYGKKNTEEKIYLPPI |
| | PADEIRNPVVLRALSQARKVINGVVRRYGSPARIHIETAREVGKSFKDRKEIEKRQEEN |
| | RKDREKAAAKFREYFPNFVGEPKSKDILKLRLYEQQHGKCLYSGKEINLGRLNEKGYV |
| | EIDHALPFSRTWDDSFNNKVLVLGSENQNKGNQTPYEYFNGKDNSREWQEFKARVET |
| | SRFPRSKKQRILLQKFDEDGFKERNLNDTRYVNRFLCQFVADRMRLTGKGKKRVFASN |
| | GQITNLLRGFWGLRKVRAENDRHHALDAVVVACSTVAMQQKITRFVRYKEMNAFDG |
| | KTIDKETGEVLHQKTHFPQPWEFFAQEVMIRVFGKPDGKPEFEEADTPEKLRTLLAEKL |
| | SSRPEAVHEYVTPLFVSRAPNRKMSGQGHMETVKSAKRLDEGVSVLRVPLTQLKLKD |
| | LEKMVNREREPKLYEALKARLEAHKDDPAKAFAEPFYKYDKAGNRTQQVKAVRVEQ |
| | VQKTGVWVRNHNGIADNATMVRVDVFEKGDKYYLVPIYSWQVAKGILPDRAVVQG |
| | KDEEDWQLIDDSFNFKFSLHPNDLVEVITKKARMFGYFASCHRGTGNINIRIHDLDHKI |
| | GKNGILEGIGVKTALSFQKYQIDELGKEIRPCRLKKRPPVR (SEQ ID NO: 314) |
| Parvibaculum | MERIFGEDIGTTSIGFSVIDYSSTQSAGNIQRLGVRIFPEARDPDGTPLNQQRRQKRMMR |
| lavamentivorans | RQLRRRRIRRKALNETLHEAGFLPAYGSADWPVVMADEPYELRRRGLEEGLSAYEFGR |
| Cas9 | AIYHLAQHRHFKGRELEESDTPDPDVDDEKEAANERAATLKALKNEQTTLGAWLARR |
| | PPSDRKRGIHAHRNVVAEEFERLWEVQSKFHPALKSEEMRARISDTIFAQRPVFWRKN |
| | TLGECRFMPGEPLCPKGSWLSQQRRMLEKLNNLAIAGGNARPLDAEERDAILSKLQQQ |
| | ASMSWPGVRSALKALYKQRGEPGAEKSLKFNLELGGESKLLGNALEAKLADMFGPD |
| | WPAHPRKQEIRHAVHERLWAADYGETPDKKRVIILSEKDRKAHREAAANSFVADFGIT |
| | GEQAAQLQALKLPTGWEPYSIPALNLFLAELEKGERFGALVNGPDWEGWRRTNEPHR |
| | NQPTGEILDKLPSPASKEERERISQLRNPTVVRTQNELRKVVNNLIGLYGKPDRIRIEVG |
| | RDVGKSKREREEIQSGIRRNEKQRKKATEDLIKNGIANPSRDDVEKWILWKEGQERCP |
| | YTGDQIGFNALFREGRYEVEHIWPRSRSFDNSPRNKTLCRKDVNIEKGNRMPFEAFGH |
| | DEDRWSAIQIRLQGMVSAKGGTGMSPGKVKRFLAKTMPEDFAARQLNDTRYAAKQIL |
| | AQLKRLWPDMGPEAPVKVEAVTGQVTAQLRKLWTLNNILADDGEKTRADHRHHAID |
| | ALTVACTHPGMTNKLSRYWQLRDDPRAEKPALTPPWDTIRADAEKAVSEIVVSHRVR |
| | KKVSGPLHKETTYGDTGTDIKTKSGTYRQFVTRKKIESLSKGELDEIRDPRIKEIVAAHV |
| | AGRGGDPKKAFPPYPCVSPGGPEIRKVRLTSKQQLNLMAQTGNGYADLGSNHHIAIYR |
| | LPDGKADFEIVSLFDASRRLAQRNPIVQRTRADGASFVMSLAAGEAIMIPEGSKKGIWI |
| | VQGVWASGQVVLERDTDADHSTTTRPMPNPILKDDAKKVSIDPIGRVRPSND (SEQ ID |
| | NO: 315) |
| Corynebacter | MKYHVGIDVGTFSVGLAAIEVDDAGMPIKTLSLVSHIHDSGLDPDEIKSAVTRLASSGI |
| diphtheria Cas9 | ARRTRRLYRRKRRRLQQLDKFIQRQGWPVIELEDYSDPLYPWKVRAELAASYIADEKE |
| | RGEKLSVALRHIARHRGWRNPYAKVSSLYLPDGPSDAFKAIREEIKRASGQPVPETATV |
| | GQMVTLCELGTLKLRGEGGVLSARLQQSDYAREIQEICRMQEIGQELYRKIIDVVFAAE |
| | SPKGSASSRVGKDPLQPGKNRALKASDAFQRYRIAALIGNLRVRVDGEKRILSVEEKNL |
| | VFDHLVNLTPKKEPEWVTIAEILGIDRGQLIGTATMTDDGERAGARPPTHDTNRSIVNS |
| | RIAPLVDWWKTASALEQHAMVKALSNAEVDDFDSPEGAKVQAFFADLDDDVHAKLD |
| | SLHLPVGRAAYSEDTLVRLTRRMLSDGVDLYTARLQEFGIEPSWTPPTPRIGEPVGNPA |
| | VDRVLKTVSRWLESATKTWGAPERVIIEHVREGFVTEKRAREMDGDMRRRAARNAK |
| | LFQEMQEKLNVQGKPSRADLWRYQSVQRQNCQCAYCGSPITFSNSEMDHIVPRAGQG |
| | STNTRENLVAVCHRCNQSKGNTPFAIWAKNTSIEGVSVKEAVERTRHWVTDTGMRST |
| | DFKKFTKAVVERFQRATMDEEIDARSMESVAWMANELRSRVAQHFASHGTTVRVYR |
| | GSLTAEARRASGISGKLKFFDGVGKSRLDRRHHAIDAAVIAFTSDYVAETLAVRSNLK |
| | QSQAHRQEAPQWREFTGKDAEHRAAWRVWCQKMEKLSALLTEDLRDDRVVVMSNV |
| | RLRLGNGSAHKETIGKLSKVKLSSQLSVSDIDKASSEALWCALTREPGFDPKEGLPANP |
| | ERHIRVNGTHVYAGDNIGLEPVSAGSIALRGGYAELGSSEHHARVYKITSGKKPAFAML |
| | RVYTIDLLPYRNQDLFSVELKPQTMSMRQAEKKLRDALATGNAEYLGWLVVDDELV |
| | VDTSKIATDQVKAVEAELGTIRRWRVDGFFSPSKLRLRPLQMSKEGIKKESAPELSKIID |
| | RPGWLPAVNKLFSDGNVTVVRRDSLGRVRLESTAHLPVTWKVQ (SEQ ID NO: 316) |
| Streptococcus | MTNGKILGLDIGIASVGVGIIEAKTGKVVHANSRLFSAANAENNAERRGFRGSRRLNRR |
| pasteurianus Cas9 | KKHRVKRVRDLFEKYGIVTDFRNLNLNPYELRVKGLTEQLKNEELFAALRTISKRRGIS |
| | YLDDAEDDSTGSTDYAKSIDENRRLLKNKTPGQIQLERLEKYGQLRGNFTVYDENGEA |
| | HRLINVFSTSDYEKEARKILETQADYNKKITAEFIDDYVEILTQKRKYYHGPGNEKSRT |
| | DYGRFRTDGTTLENIFGILIGKCNFYPDEYRASKASYTAQEYNFLNDLNNLKVSTETGK |
| | LSIEQKESLVEFAKNTATLGPAKLLKEIAKILDCKVDEIKGYREDDKGKPDLHTFEPYR |
| | KLKFNLESINIDDLSREVIDKLADILTLNTEREGIEDAIKRNLPNQFTEEQISEIIKVRKSQS |
| | TAFNKGWHSFSAKLMNELIPELYATSDEQMTILTRLEKFKVNKKSSKNTKTIDEKEVTD |
| | EIYNPVVAKSVRQTIKIINAAVKKYGDFDKIVIEMPRDKNADDEKKFIDKRNKENKKEK |
| | DDALKRAAYLYNSSDKLPDEVFHGNKQLETKIRLWYQQGERCLYSGKPISIQELVHNS |
| | NNFEIDHILPLSLSFDDSLANKVLVYAWTNQEKGQKTPYQVIDSMDAAWSFREMKDY |
| | VLKQKGLGKKKRDYLLTTENIDKIEVKKKFIERNLVDTRYASRVVLNSLQSALRELGK |
| | DTKVSVVRGQFTSQLRRKWKIDKSRETYHHHAVDALIIAASSQLKLWEKQDNPIVWVD |
| | YGKNQVVDKQTGEILSVSDDEYKELVFQPPYQGFVNTISSKGFEDEILFSYQVDSKYNR |
| | KVSDATIYSTRKAKIGKDKKEETYVLGKIKDIYSQNGFDTFIKKYNKDKTQFLMYQKD |
| | SLTWENVIEVILRDYPTTKKSEDGKNDVKCNPFEEYRRENGLICKYSKKGKGTPIKSLK |
| | YYDKKLGNCIDITPEESRNKVILQSINPWRADVYFNPETLKYELMGLKYSDLSFEKGTG |
| | NYHISQEKYDAIKEKEGIGKKSEFKFTLYRNDLILIKDIASGEQEIYRFLSRTMPNVNHY |
| | VELKPYDKEKFDNVQELVEALGEADKVGRCIKGLNKPNISIYKVRTDVLGNKYFVKK |
| | KGDKPKLDFKNNKK (SEQ ID NO: 317) |
| Neisseria cinerea | MAAFKPNPMNYILGLDIGIASVGWAIVEIDEEENPIRLIDLGVRVFERAEVPKTGDSLAA |
| Cas9 | ARRLARSVRRLTRRRAHRLLRARRLLKREGVLQAADFDENGLIKSLPNTPWQLRAAAL |
| | DRKLTPLEWSAVLLHLIKHRGYLSQRKNEGETADKELGALLKGVADNTHALQTGDFR |
| | TPAELALNKFEKESGHIRNQRGDYSHTFNRKDLQAELNLLFEKQKEFGNPHVSDGLKE |
| | GIETLLMTQRPALSGDAVQKMLGHCIFEPTEPKAAKNTYTAERFVWLTKLNNLRILEQ |
| | GSERPLTDTERATLMDEPYRKSKLTYAQARKLLDLDDTAFFKGLRYGKDNAEASTLM |
| | EMKAYHAISRALEKEGLKDKKSPLNLSPELQDEIGTAFSLFKTDEDITGRLKDRVQPEIL |
| | EALLKHISFDKFVQISLKALRRIVPLMEQGNRYDEACTEIYGDHYGKKNTEEKIYLPPIP |
| | ADEIRNPVVLRALSQARKVINGVVRRYGSPARIHIETAREVGKSFKDRKEIEKRQEENR |
| | KDREKSAAKFREYFPNFVGEPKSKDILKLRLYEQQHGKCLYSGKEINLGRLNEKGYVEI |
| | DHALPFSRTWDDSFNNKVLALGSENQNKGNQTPYEYFNGKDNSREWQEFKARVETSR |
| | FPRSKKQRILLQKFDEDGFKERNLNDTRYINRFLCQFVADHMLLTGKGKRRVFASNGQ |
| | ITNLLRGFWGLRKVRAENDRHHALDAVVVACSTIAMQQKITRFVRYKEMNAFDGKTI |
| | DKETGEVLHQKAHFPQPWEFFAQEVMIRVFGKPDGKPEFEEADTPEKLRTLLAEKLSS |
| | RPEAVHKYVTPLFISRAPNRKMSGQGHMETVKSAKRLDEGISVLRVPLTQLKLKDLEK |
| | MVNREREPKLYEALKARLEAHKDDPAKAFAEPFYKYDKAGNRTQQVKAVRVEQVQK |
| | TGVWVHNHNGIADNATIVRVDVFEKGGKYYLVPIYSWQVAKGILPDRAVVQGKDEE |
| | DWTVMDDSFEFKFVLYANDLIKLTAKKNEFLGYFVSLNRATGAIDIRTHDTDSTKGKN |
| | GIFQSVGVKTALSFQKYQIDELGKEIRPCRLKKRPPVR (SEQ ID NO: 318) |
| Campylobacter lari | MRILGEDIGINSIGWAFVENDELKDCGVRIFTKAENPKNKESLALPRRNARSSRRRLKR |
| Cas9 | RKARLIAIKRILAKELKLNYKDYVAADGELPKAYEGSLASVYELRYKALTQNLETKDL |
| | ARVILHIAKHRGYMNKNEKKSNDAKKGKILSALKNNALKLENYQSVGEYFYKEFFQK |
| | YKKNTKNFIKIRNTKDNYNNCVLSSDLEKELKLILEKQKEFGYNYSEDFINEILKVAFFQ |
| | RPLKDFSHLVGACTFFEEEKRACKNSYSAWEEVALTKIINEIKSLEKISGEIVPTQTINEV |
| | LNLILDKGSITYKKFRSCINLHESISFKSLKYDKENAENAKLIDFRKLVEFKKALGVHSL |
| | SRQELDQISTHITLIKDNVKLKTVLEKYNLSNEQINNLLEIEFNDYINLSFKALGMILPLM |
| | REGKRYDEACEIANLKPKTVDEKKDFLPAFCDSIFAHELSNPVVNRAISEYRKVLNALL |
| | KKYGKVHKIHLELARDVGLSKKAREKIEKEQKENQAVNAWALKECENIGLKASAKNI |
| | LKLKLWKEQKEICIYSGNKISIEHLKDEKALEVDHIYPYSRSFDDSFINKVLVFTKENQE |
| | KLNKTPFEAFGKNIEKWSKIQTLAQNLPYKKKNKILDENFKDKQQEDFISRNLNDTRYI |
| | ATLIAKYTKEYLNFLLLSENENANLKSGEKGSKIHVQTISGMLTSVLRHTWGFDKKDR |
| | NNHLHHALDAIIVAYSINSIIKAFSDERKNQELLKARFYAKELTSDNYKHQVKFFEPFK |
| | SFREKILSKIDEIFVSKPPRKRARRALHKDTFHSENKIIDKCSYNSKEGLQIALSCGRVRK |
| | IGTKYVENDTIVRVDIFKKQNKFYAIPIYAMDFALGILPNKIVITGKDKNNNPKQWQTID |
| | ESYEFCFSLYKNDLILLQKKNMQEPEFAYYNDFSISTSSICVEKHDNKFENLTSNQKLLF |
| | SNAKEGSVKVESLGIQNLKVFEKYIITPLGDKIKADFQPRENISLKTSKKYGLR (SEQ ID |
| | NO: 319) |
| T. denticola Cas9 | MKKEIKDYFLGLDVGTGSVGWAVTDTDYKLLKANRKDLWGMRCFETAETAEVRRLH |
| | RGARRRIERRKKRIKLLQELFSQEIAKTDEGFFQRMKESPFYAEDKTILQENTLENDKDF |
| | ADKTYHKAYPTINHLIKAWIENKVKPDPRLLYLACHNIIKKRGHFLFEGDFDSENQFDT |
| | SIQALFEYLREDMEVDIDADSQKVKEILKDSSLKNSEKQSRLNKILGLKPSDKQKKAIT |
| | NLISGNKINFADLYDNPDLKDAEKNSISFSKDDFDALSDDLASILGDSFELLLKAKAVY |
| | NCSVLSKVIGDEQYLSFAKVKIYEKHKTDLTKLKNVIKKHFPKDYKKVEGYNKNEKN |
| | NNNYSGYVGVCKTKSKKLIINNSVNQEDFYKFLKTILSAKSEIKEVNDILTEIETGTFLP |
| | KQISKSNAEIPYQLRKMELEKILSNAEKHFSFLKQKDEKGLSHSEKIIMLLTFKIPYYIGPI |
| | NDNHKKFFPDRCWVVKKEKSPSGKTTPWNEFDHIDKEKTAEAFITSRINFCTYLVGES |
| | VLPKSSLLYSEYTVLNEINNLQIIIDGKNICDIKLKQKIYEDLFKKYKKITQKQISTFIKHE |
| | GICNKTDEVIILGIDKECTSSLKSYIELKNIFGKQVDEISTKNMLEEIIRWATIYDEGEGKT |
| | ILKTKIKAEYGKYCSDEQIKKILNLKFSGWGRLSRKFLETVTSEMPGFSEPVNIITAMRE |
| | TQNNLMELLSSEFTFTENIKKINSGEEDAEKQFSYDGLVKPLFLSPSVIUMLWQTLKLV |
| | KEISHITQAPPKKIFIEMAKGAELEPARTKTRLKILQDLYNNCKNDADAFSSEIKDLSGKI |
| | ENEDNLRLRSDKLYLYYTQLGKCMYCGKPIEIGHVFDTSNYDIDHIYPQSKIKDDSISNR |
| | VLVCSSCNKNKEDKYPLKSEIQSKQRGEWNFLQRNNFISLEKLNRLTRATPISDDETAK |
| | FIARQLVETRQATKVAAKVLEKMFPETKIVYSKAETVSMFRNKFDIVKCREINDFHHA |
| | HDAYLNIVVGNVYNIKFTNNPWNFIKEKRDNPKIADTYNYYKVEDYDVKRNNITAWE |
| | KGKTIITVKDMLKRNTPIYTRQAACKKGELFNQTIMKKGLGQHPLKKEGPFSNISKYGG |
| | YNKVSAAYYTLIEYEEKGNKIRSLETIPLYLVKDIQKDQDVLKSYLTDLLGKKEFKILVP |
| | KIKINSLLKINGFPCHITGKTNDSFLLRPAVQFCCSNNEVLYFKKIIRFSEIRSQREKIGKTI |
| | SPYEDLSFRSYIKENLWKKTKNDEIGEKEFYDLLQKKNLEIYDMLLTKHKDTIYKKRPN |
| | SATIDILVKGKEKFKSLIIENQFEVILEILKLFSATRNVSDLQHIGGSKYSGVAKIGNKISS |
| | LDNCILIYQSITGIFEKRIDLLKV (SEQ ID NO: 320) |
| S. mutans Cas9 | MKKPYSIGLDIGTNSVGWAVVTDDYKVPAKKMKVLGNTDKSHIEKNLLGALLFDSGN |
| | TAEDRRLKRTARRRYTRRRNRILYLQEIFSEEMGKVDDSFFHRLEDSFLVTEDKRGERH |
| | PIEGNLEEEVKYHENEPTIYHLRQYLADNPEKVDLRLVYLALAHIIKERGHFLIEGKEDT |
| | RNNDVQRLFQEFLAVYDNTFENSSLQEQNVQVEEILTDKISKSAKKDRVLKLFPNEKSN |
| | GRFAEFLKLIVGNQADFKKHFELEEKAPLQFSKDTYEEELEVLLAQIGDNYAELFLSAK |
| | KLYDSILLSGILTVTDVGTKAPLSASMIQRYNEHQMDLAQLKQFIRQKLSDKYNEVFSD |
| | VSKDGYAGYIDGKTNQEAFYKYLKGLLNKIEGSGYFLDKIEREDFLRKQRTFDNGSIPH |
| | QIHLQEMRAIIRRQAEFYPFLADNQDRIEKLLTFRIPYYVGPLARGKSDFAWLSRKSAD |
| | KITPWNFDEIVDKESSAEAFINRMTNYDLYLPNQKVLPKHSLLYEKFTVYNELTKVKY |
| | KTEQGKTAFFDANMKQEIFDGVFKVYRKVTKDKLMDFLEKEFDEFRIVDLTGLDKEN |
| | KVFNASYGTYHDLCKILDKDELDNSKNEKILEDIVLTLTLFEDREMIRKRLENYSDLLT |
| | KEQVKKLERRHYTGWGRLSAELIHGIRNKESRKTILDYLIDDGNSNRNFMQLINDDALS |
| | FKEEIAKAQVIGETDNLNQVVSDIAGSPAIKKGILQSLKIVDELVKIMGHQPENIVVEMA |
| | RENQFTNQGRRNSQQRLKGLTDSIKEFGSQILKEHPVENSQLQNDRLFLYYLQNGRDM |
| | YTGEELDIDYLSQYDIDHIIPQAFIKDNSIDNRVLTSSKENRGKSDDVPSKDVVRKMKSY |
| | WSKLLSAKLITQRKFDNLTKAERGGLTDDDKAGFIKRQLVETRQITKHVARILDERFNT |
| | ETDENNKKIRQVKIVILKSNLVSNERKEFELYKVREINDYHHAHDAYLNAVIGKALLG |
| | VYPQLEPEFVYGDYPHFHGHKENKATAKKFFYSNIMNFFKKDDVRTDKNGEIIWKKD |
| | EHISNIKKVLSYPQVNIVKKVEEQTGGFSKESILPKGNSDKLIPRKTKKFYWDTKKYGG |
| | FDSPIVAYSILVIADIEKGKSKKLKTVKALVGVTIMEKMTFERDPVAFLERKGYRNVQE |
| | ENIIKLPKYSLFKLENGRKRLLASARELQKGNEIVLPNHLGTLLYHAKNIHKVDEPKHL |
| | DYVDKHKDEFKELLDVVSNFSKKYTLAEGNLEKIKELYAQNNGEDLKELASSFINLLT |
| | FTAIGAPATFKFFDKNIDRKRYTSTTEILNATLIHQSITGLYETRIDLNKL GGD (SEQ ID |
| | NO: 321) |
| S. thermophilus | MTKPYSIGLDIGTNSVGWAVTTDNYKVPSKKMKVLGNTSKKYIKKNLLGVLLFDSGIT |
| CRISPR 3 Cas9 | AEGRRLKRTARRRYTRRRNRILYLQEIFSTEMATLDDAFFQRLDDSFLVPDDKRDSKYP |
| | IFGNLVEEKAYHDEFPTIYHLRKYLADSTKKADLRLVYLALAHMIKYRGHFLIEGEFNS |
| | KNNDIQKNFQDFLDTYNAIFESDLSLENSKQLEEIVKDKISKLEKKDRILKLFPGEKNSGI |
| | FSEFLKLIVGNQADFRKCFNLDEKASLHFSKESYDEDLETLLGYIGDDYSDVFLKAKKL |
| | YDAILLSGELTVTDNETEAPLSSAMIKRYNEHKEDLALLKEYIRNISLKTYNEVEKDDT |
| | KNGYAGYIDGKINQEDFYVYLKKLLAEFEGADYFLEKIDREDFLRKQRTEDNGSIPYQI |
| | HLQEMRAILDKQAKFYPFLAKNKERIEKILITRIPYYVGPLARGNSDFAWSIRKRNEKIT |
| | PWNFEDVIDKESSAEAFINRMTSFDLYLPEEKVLPKHSLLYETFNVYNELTKVRFIAES |
| | MRDYQFLDSKQKKDIVRLYEKDKRKVTDKDHEYLHAIYGYDGIELKGIEKQENSSLST |
| | YHDLLNIINDKEFLDDSSNEAHEEIIHTLTIFEDREMIKQRLSKFENIFDKSVLKKLSRRH |
| | YTGWGKLSAKLINGIRDEKSGNTILDYLIDDGISNRNFMQLIHDDALSFKKKIQKAQIIG |
| | DEDKGNIKEVVKSLPGSPAIKKGILQSIKIVDELVKVMGGRKPESIVVEMARENQYTNQ |
| | GKSNSQQRLKRLEKSLKELGSKILKENIPAKLSKIDNNALQNDRLYLYYLQNGKDMYT |
| | GDDLDIDRLSNYDIDHIIPQAFLKDNSIDNKVLVSSASNRGKSDDVPSLEVVKKRKTFW |
| | YQLLKSKLISQRKFDNLTKAERGGLSPEDKAGFIQRQLVETRQIIKHVARLLDEKENNK |
| | KDENNRAVRTVKIITLKSTLVSQFRKDFELYKVREINDFHHAHDAYLNAVVASALLKK |
| | YPKLEPEFVYGDYPKYNSFRERKSATEKVYFYSNIMNIFKKSISLADGRVIERPLIEVNE |
| | ETGESVWNKESDLATVRRVLSYPQVNVVKKVEEQNHGLDRGKPKGLFNANLSSKPKP |
| | NSNENLVGAKEYLDPKKYGGYAGISNSFTVLVKGTIEKGAKKKITNVLEFQGISILDRIN |
| | YRKDKLNELLEKGYKDIELIIELPKYSLFELSDGSRRMLASILSTNNKRGEIHKGNQIFLS |
| | QKFVKLLYHAKRISNTINENHRKYVENHKKEFEELFYYILEFNENYVGAKKNGKLLNS |
| | AFQSWQNHSIDELCSSFIGPTGSERKGLFELTSRGSAADFEFLGVKIPRYRDYTPSSLLK |
| | DATLIHQSVTGLYETRIDLAKLGEG (SEQ ID NO: 322) |
| C. jejuni Cas9 | MARILAFDIGISSIGWAFSENDELKDCGVRIFTKVENPKTGESLALPRRLARSARKRLAR |
| | RKARLNHLKHLIANEFKLNYEDYQSFDESLAKAYKGSLISPYELRFRALNELLSKQDFA |
| | RVILHIAKRRGYDDIKNSDDKEKGAILKAIKQNEEKLANYQSVGEYLYKEYFQKFKEN |
| | SKEFTNVRNKKESYERCIAQSELKDELKLIFKKQREFGESFSKKFEEEVLSVAFYKRALK |
| | DFSHLVGNCSFFTDEKRAPKNSPLAFMFVALTRIINLLNNLKNIEGILYTKDDLNALLN |
| | EVLKNGTLTYKQTKKLLGLSDDYEFKGEKGTYFIEFKKYKEFIKALGEHNLSQDDLNEI |
| | AKDITLIKDEIKLKKALAKYDLNQNQIDSLSKLEFKDHLNISFKALKLVTPLMLEGKKY |
| | DEACNELNLKVAINEDKKDFLPAFNETYYKDEVTNPVVLRAIKEYRKVLNALLKKYG |
| | KVHKINIELAREVGKNHSQRAKIEKEQNENYKAKKDAELECEKLGLKINSKNILKLRLF |
| | KEQKEFCAYSGEKIKISDLQDEKMLEIDHIYPYSRSFDDSYMNKVLVFTKQNQEKLNQT |
| | PFEAFGNDSAKWQKIEVLAKNLPTKKQKRILDKNYKDKEQKNFKDRNLNDTRYIARL |
| | VLNYTKDYLDFLPLSDDENTKLNDTQKGSKVHVEAKSGMLTSALRHTWGFSAKDRN |
| | NHLHHAIDAVIIAYANNSIVKAFSDFKKEQESNSAELYAKKISELDYKNKRKFFEPFSGF |
| | RQKVLDKIDEIFVSKPERKKPSGALHEETFRKEEEFYQSYGGKEGVLKALELGKIRKVN |
| | GKIVKNGDMFRVDIFKHKKTNKFYAVPIYTMDFALKVLPNKAVARSKKGEIKDWILM |
| | DENYEFCFSLYKDSLILIQTKDMQEPEFVYYNAFTSSTVSLIVSKHDNKFETLSKNQKIL |
| | FKNANEKEVIAKSIGIQNLKVFEKYIVSALGEVTKAEFRQREDFKK (SEQ ID NO: 323) |
| P. multocida Cas9 | MQTTNLSYILGLDLGIASVGWAVVEINENEDPIGLIDVGVRIFERAEVPKTGESLALSRR |
| | LARSTRRLIRRRAHRLLLAKRFLKREGILSTIDLEKGLPNQAWELRVAGLERRLSAIEW |
| | GAVLLHLIKHRGYLSKRKNESQTNNKELGALLSGVAQNHQLLQSDDYRTPAELALKK |
| | FAKEEGHIRNQRGAYTHTFNRLDLLAELNLLFAQQHQFGNPHCKEHIQQYMTELLMW |
| | QKPALSGEAILKMLGKCTHEKNEFKAAKHTYSAERFVWLTKLNNLRILEDGAERALNE |
| | EERQLLINHPYEKSKLTYAQVRKLLGLSEQAIFKHLRYSKENAESATFMELKAWHAIR |
| | KALENQGLKDTWQDLAKKPDLLDEIGTAFSLYKTDEDIQQYLTNKVPNSVINALLVSL |
| | NFDKFIELSLKSLRKILPLMEQGKRYDQACREIYGHHYGEANQKTSQLLPAIPAQEIRNP |
| | VVLRTLSQARKVINAIIRQYGSPARVHIETGRELGKSFKERREIQKQQEDNRTKRESAV |
| | QKFKELFSDFSSEPKSKDILKFRLYEQQHGKCLYSGKEINIHRLNEKGYVEIDHALPFSR |
| | TWDDSFNNKVLVLASENQNKGNQTPYEWLQGKINSERWKNFVALVLGSQCSAAKKQ |
| | RLLTQVIDDNKFIDRNLNDTRYIARFLSNYIQENLLLVGKNKKNVFTPNGQITALLRSR |
| | WGLIKARENNNRHHALDAIVVACATPSMQQKITRFIRFKEVHPYKIENRYEMVDQESG |
| | EIISPHFPEPWAYFRQEVNIRVFDNHPDTVLKEMLPDRPQANHQFVQPLFVSRAPTRKM |
| | SGQGHMETIKSAKRLAEGISVLRIPLTQLKPNLLENMVNKEREPALYAGLKARLAEFN |
| | QDPAKAFATPFYKQGGQQVKAIRVEQVQKSGVLVRENNGVADNASIVRTDVFIKNNK |
| | FFLVPIYTWQVAKGILPNKAIVAHKNEDEWEEMDEGAKFKFSLFPNDLVELKTKKEYF |
| | FGYYIGLDRATGNISLKEHDGEISKGKDGVYRVGVKLALSFEKYQVDELGKNRQICRP |
| | QQRQPVR (SEQ ID NO: 324) |
| F. novicida Cas9 | MNFKILPIAIDLGVKNTGVFSAFYQKGTSLERLDNKNGKVYELSKDSYTLLMNNRTAR |
| | RHQRRGIDRKQLVKRLFKLIWTEQLNLEWDKDTQQAISFLFNRRGFSFITDGYSPEYLN |
| | IVPEQVKAILMDIFDDYNGEDDLDSYLKLATEQESKISEIYNKLMQKILEFKLMKLCTDI |
| | KDDKVSTKTLKEITSYEFELLADYLANYSESLKTQKFSYTDKQGNLKELSYYHHDKYN |
| | IQEFLKRHATINDRILDILLTDDLDIWNFNFEKFDFDKNEEKLQNQEDKDHIQAHLHHF |
| | VFAVNKIKSEMASGGRHRSQYFQEITNVLDENNHQEGYLKNFCENLHNKKYSNLSVK |
| | NLVNLIGNLSNLELKPLRKYFNDKIHAKADHWDEQKFTETYCHWILGEWRVGVKDQD |
| | KKDGAKYSYKDLCNELKQKVTKAGLVDFLLELDPCRTIPPYLDNICNRKPPKCQSLILN |
| | PKFLDNQYPNWQQYLQELKKLQSIQNYLDSFETDLKVLKSSKDQPYFVEYKSSNQQIA |
| | SGQRDYKDLDARILQFIFDRVKASDELLLNEIYFQAKKLKQKASSELEKLESSKKLDEVI |
| | ANSQLSQILKSQHTNGIFEQGTFLHLVCKYYKQRQRARDSRLYIMPEYRYDKKLHKYN |
| | NTGRFDDDNQLLTYCNHKPRQKRYQLLNDLAGVLQVSPNFLKDKIGSDDDLFISKWL |
| | WHIRGFKKACEDSLKIQKDNRGLLNHKINIARNTKGKCEKEIFNLICKIEGSEDKKGNY |
| | KHGLAYELGVLLFGEPNEASKPEFDRKIKKFNSIYSFAQIQQIAFAERKGNANTCAVCS |
| | ADNAHRMQQIKITEPVEDNKDKIILSAKAQRLPAIPTRIVDGAVKKMATILAKNIVDDN |
| | WQNIKQVLSAKHQLHIPIITESNAFEFEPALADVKGKSLKDRRKKALERISPENIFKDKN |
| | NRIKEFAKGISAYSGANLTDGDFDGAKEELDHIIPRSHKKYGTLNDEANLICVTRGDNK |
| | NKGNRIFCLRDLADNYKLKQFETTDDLEIEKKIADTIWDANKKDFKFGNYRSFINLTPQ |
| | EQKAFRHALFLADENPIKQAVIRAINNRNRTFVNGTQRYFAEVLANNIYLRAKKENLN |
| | TDKISFDYFGIPTIGNGRGIAEIRQLYEKVDSDIQAYAKGDKPQASYSHLIDAMLAFCIA |
| | ADEHRNDGSIGLEIDKNYSLYPLDKNTGEVFTKDIFSQIKITDNEFSDKKLVRKKAIEGF |
| | NTHRQMTRDGIYAENYLPILIHKELNEVRKGYTWKNSEEIKIFKGKKYDIQQLNNLVY |
| | CLKFVDKPISIDIQISTLEELRNILTINNIAATAEYYYINLKTQKLHEYYIENYNTALGYK |
| | KYSKEMEFLRSLAYRSERVKIKSIDDVKQVLDKDSNFIIGKITLPFKKEWQRLYREWQN |
| | TTIKDDYEFLKSFFNVKSITKLHKKVRKDFSLPISTNEGKFLVKRKTWDNNFIYQILNDS |
| | DSRADGTKPFIPAFDISKNEIVEAIIDSFTSKNIFWLPKNIELQKVDNKNIFAIDTSKWFEV |
| | ETPSDLRDIGIATIQYKIDNNSRPKVRVKLDYVIDDDSKINYFMNHSLLKSRYPDKVLEI |
| | LKQSTIIEFESSGFNKTIKEMLGMKLAGIYNETSNN (SEQ ID NO: 325) |
| Lactobacillus | MKVNNYHIGLDIGTSSIGWVAIGKDGKPLRVKGKTAIGARLFQEGNPAADRRMFRTTR |
| buchneri Cas9 | RRLSRRKWRLKLLEEIFDPYITPVDSTFFARLKQSNLSPKDSRKEFKGSMLFPDLTDMQ |
| | YHKNYPTIYHLRHALMTQDKKFDIRMVYLAIHHIVKYRGNFLNSTPVDSFKASKVDFV |
| | DQFKKLNELYAAINPEESFKINLANSEDIGHQFLDPSIRKFDKKKQIPKIVPVMMNDKVT |
| | DRLNGKIASEIIHAILGYKAKLDVVLQCTPVDSKPWALKFDDEDIDAKLEKILPEMDEN |
| | QQSIVAILQNLYSQVTLNQIVPNGMSLSESMIEKYNDHHDHLKLYKKLIDQLADPKKK |
| | AVLKKAYSQYVGDDGKVIEQAEFWSSVKKNLDDSELSKQIMDLIDAEKFMPKQRTSQ |
| | NGVIPHQLHQRELDEIIEHQSKYYPWLVEINPNKHDLHLAKYKIEQLVAFRVPYYVGP |
| | MITPKDQAESAETVFSWMERKGTETGQITPWNFDEKVDRKASANRFIKRMTTKDTYLI |
| | GEDVLPDESLLYEKFKVLNELNMVRVNGKLLKVADKQAIFQDLFENYKHVSVKKLQN |
| | YIKAKTGLPSDPEISGLSDPEHFNNSLGTYNDFKKLFGSKVDEPDLQDDFEKIVEWSTVF |
| | EDKKILREKLNEITWLSDQQKDVLESSRYQGWGRLSKKLLTGIVNDQGERIIDKLWNT |
| | NKNFMQIQSDDDFAKRIHEANADQMQAVDVEDVLADAYTSPQNKKAIRQVVKVVDD |
| | IQKAMGGVAPKYISIEFTRSEDRNPRRTISRQRQLENTLKDTAKSLAKSINPELLSELDN |
| | AAKSKKGLTDRLYLYFTQLGKDIYTGEPINIDELNKYDIDHILPQAFIKDNSLDNRVLVL |
| | TAVNNGKSDNVPLRMFGAKMGHFWKQLAEAGLISKRKLKNLQTDPDTISKYAMEGFI |
| | RRQLVETSQVIKLVANILGDKYRNDDTKIIEITARMNHQMRDEFGFIKNREINDYHHAF |
| | DAYLTAFLGRYLYHRYIKLRPYFVYGDFKKFREDKVTMRNFNFLHDLTDDTQEKIAD |
| | AETGEVIWDRENSIQQLKDVYHYKFMLISHEVYTLRGAMFNQTVYPASDAGKRKLIPV |
| | KADRPVNVYGGYSGSADAYMAIVRIHNKKGDKYRVVGVPMRALDRLDAAKNVSDA |
| | DFDRALKDVLAPQLTKTKKSRKTGEITQVIEDIEIVLGKVMYRQLMIDGDKKFMLGSS |
| | TYQYNAKQLVLSDQSVKTLASKGRLDPLQESMDYNNVYTEILDKVNQYFSLYDMNKF |
| | RHKLNLGFSKFISFPNHNVLDGNTKVSSGKREILQEILNGLHANPTFGNLKDVGITTPFG |
| | QLQQPNGILLSDETKIRYQSPTGLFERTVSLKDL (SEQ ID NO: 326) |
| Listeria innocua | MKKPYTIGLDIGTNSVGWAVLTDQYDLVKRKMKIAGDSEKKQIKKNFWGVRLFDEGQ |
| Cas9 | TAADRRMARTARRRIERRRNRISYLQGIFAEEMSKTDANFFCRLSDSFYVDNEKRNSR |
| | HPFFATIEEEVEYHKNYPTIYHLREELVNSSEKADLRLVYLALAHIIKYRGNFLIEGALD |
| | TQNTSVDGIYKQFIQTYNQVFASGIEDGSLKKLEDNKDVAKILVEKVTRKEKLERILKL |
| | YPGEKSAGMFAQFISLIVGSKGNFQKPFDLIEKSDIECAKDSYEEDLESLLALIGDEYAE |
| | LFVAAKNAYSAVVLSSIITVAETETNAKLSASMIERFDTHEEDLGELKAFIKLHLPKHYE |
| | EIFSNTEKHGYAGYIDGKTKQADFYKYMKMTLENIEGADYFIAKIEKENFLRKQRTFD |
| | NGAIPHQLHLEELEAILHQQAKYYPFLKENYDKIKSLVTFRIPYFVGPLANGQSEFAWL |
| | TRKADGEIRPWNIEEKVDFGKSAVDFIEKMTNKDTYLPKENVLPKHSLCYQKYLVYNE |
| | LTKVRYINDQGKTSYFSGQEKEQIFNDLFKQKRKVKKKDLELFLRNMSHVESPTIEGLE |
| | DSFNSSYSTYHDLLKVGIKQEILDNPVNTEMLENIVKILTVFEDKRMIKEQLQQFSDVL |
| | DGVVLKKLERRHYTGWGRLSAKLLMGIRDKQSHLTILDYLMNDDGLNRNLMQLINDS |
| | NLSFKSIIEKEQVTTADKDIQSIVADLAGSPAIKKGILQSLKIVDELVSVMGYPPQTIVVE |
| | MARENQTTGKGKNNSRPRYKSLEKAIKEFGSQILKEHPTDNQELRNNRLYLYYLQNGK |
| | DMYTGQDLDIHNLSNYDIDHIVPQSFITDNSIDNLVLTSSAGNREKGDDVPPLEIVRKRK |
| | VFWEKLYQGNLMSKRKFDYLTKAERGGLTEADKARFIHRQLVETRQITKNVANILHQ |
| | RFNYEKDDHGNTMKQVRIVTLKSALVSQFRKQFQLYKVRDVNDYHHAHDAYLNGVV |
| | ANTLLKVYPQLEPEFVYGDYHQFDWFKANKATAKKQFYTNIMLFFAQKDRIIDENGEI |
| | LWDKKYLDTVKKVMSYRQMNIVKKTEIQKGEFSKATIKPKGNSSKLIPRKTNWDPMK |
| | YGGLDSPNMAYAVVIEYAKGKNKLVFEKKIIRVTIMERKAFEKDEKAFLEEQGYRQPK |
| | VLAKLPKYTLYECEEGRRRMLASANEAQKGNQQVLPNHLVTLLHHAANCEVSDGKSL |
| | DYIESNREMFAELLAHVSEFAKRYTLAEANLNKINQLFEQNKEGDIKAIAQSFVDLMAF |
| | NAMGAPASFKFFETTIERKRYNNLKELLNSTIIYQSITGLYESRKRLDD (SEQ ID NO: |
| | 327) |
| L. pneumophilia | MESSQILSPIGIDLGGKFTGVCLSHLEAFAELPNHANTKYSVILIDHNNFQLSQAQRRAT |
| Cas9 | RHRVRNKKRNQFVKRVALQLFQHILSRDLNAKEETALCHYLNNRGYTYVDTDLDEYI |
| | KDETTINLLKELLPSESEHNFIDWFLQKMQSSEFRKILVSKVEEKKDDKELKNAVKNIK |
| | NFITGFEKNSVEGHRIIRKVYFENIKSDITKDNQLDSIKKKIPSVCLSNLLGHLSNLQWK |
| | NLHRYLAKNPKQFDEQTFGNEFLRMLKNFRHLKGSQESLAVRNLIQQLEQSQDYISILE |
| | KTPPEITIPPYEARTNTGMEKDQSLLLNPEKLNNLYPNWRNLIPGIIDAHPFLEKDLEHT |
| | KLRDRKRIISPSKQDEKRDSYILQRYLDLNKKIDKFKIKKQLSFLGQGKQLPANLIETQK |
| | EMETHFNSSLVSVLIQIASAYNKEREDAAQGIWFDNAFSLCELSNINPPRKQKILPLLVG |
| | AILSEDFINNKDKWAKFKIFWNTHKIGRTSLKSKCKEIEEARKNSGNAFKIDYEEALNH |
| | PEHSNNKALIKIIQTIPDIIQAIQSHLGHNDSQALIYHNPFSLSQLYTILETKRDGFHKNCV |
| | AVTCENYWRSQKTEIDPEISYASRLPADSVRPFDGVLARMMQRLAYEIAMAKWEQIK |
| | HIPDNSSLLIPIYLEQNRFEFEESFKKIKGSSSDKTLEQAIEKQNIQWEEKFQRIINASMNI |
| | CPYKGASIGGQGEIDHIYPRSLSKKHFGVIFNSEVNLIYCSSQGNREKKEEHYLLEHLSP |
| | LYLKHQFGTDNVSDIKNFISQNVANIKKYISFHLLTPEQQKAARHALFLDYDDEAFKTI |
| | TKFLMSQQKARVNGTQKFLGKQIMEFLSTLADSKQLQLEFSIKQITAEEVHDHRELLSK |
| | QEPKLVKSRQQSFPSHAIDATLTMSIGLKEFPQFSQELDNSWFINHLMPDEVHLNPVRS |
| | KEKYNKPNISSTPLFKDSLYAERFIPVWVKGETFAIGFSEKDLFEIKPSNKEKLFTLLKTY |
| | STKNPGESLQELQAKSKAKWLYFPINKTLALEFLHHYFHKEIVTPDDTTVCHFINSLRY |
| | YTKKESITVKILKEPMPVLSVKFESSKKNVLGSFKHTIALPATKDWERLFNHPNFLALK |
| | ANPAPNPKEFNEFIRKYFLSDNNPNSDIPNNGHNIKPQKHKAVRKVFSLPVIPGNAGTM |
| | MRIRRKDNKGQPLYQLQTIDDTPSMGIQINEDRLVKQEVLMDAYKTRNLSTIDGINNSE |
| | GQAYATFDNWLTLPVSTFKPEIIKLEMKPHSKTRRYIRITQSLADFIKTIDEALMIKPSDS |
| | IDDPLNMPNEIVCKNKLFGNELKPRDGKMKIVSTGKIVTYEFESDSTPQWIQTLYVTQL |
| | KKQP (SEQ ID NO: 328) |
| N. lactamica Cas9 | MAAFKPNPMNYILGLDIGIASVGWAMVEVDEEENPIRLIDLGVRVFERAEVPKTGDSL |
| | AMARRLARSVRRLTRRRAHRLLRARRLLKREGVLQDADFDENGLVKSLPNTPWQLRA |
| | AALDRKLTCLEWSAVLLHLVKIIRGYLSQRKNEGETADKELGALLKGVADNAHALQT |
| | GDFRIPAELALNKFEKESGHIRNQRGDYSHTFSRKDLQAELNLLFEKQKEFGNPHVSD |
| | GLKEDIETLLMAQRPALSGDAVQKMLGHCTFEPAEPKAAKNTYTAERFIWLTKLNNLR |
| | ILEQGSERPLTDTERATLMDEPYRKSKLTYAQARKLLGLEDTAFFKGLRYGKDNAEAS |
| | TLMEMKAYHAISRALEKEGLKDKKSPLNLSTELQDEIGTAFSLFKTDKDITGRLKDRVQ |
| | PEILEALLKHISFDKFVQISLKALRRIVPLMEQGKRYDEACAEIYGDHYCKKNAEEKIYL |
| | PPIPADEIRNPVVLRALSQARKVINCVVRRYGSPARIHIETAREVGKSFKDRKEIEKRQE |
| | ENRKDREKAAAKFREYFPNFVGEPKSKDILKLRLYEQQHGKCLYSGKEINLVRLNEKG |
| | YVEIDHALPFSRTWDDSFNNKVLVLGSENQNKGNQTPYEYFNGKDNSREWQEFKARV |
| | ETSRFPRSKKQRILLQKFDEEGFKERNLNDTRYVNRFLCQFVADHILLTGKGKRRVFAS |
| | NGQITNLLRGFWGLRKVRTENDRHHALDAVVVACSTVAMQQKITRFVRYKEMNAFD |
| | GKTIDKETGEVLHQKAHFPQPWEFFAQEVMIRVFGKPDGKPEFEEADTPEKLRTLLAE |
| | KLSSRPEAVHEYVTPLFVSRAPNRKMSGQGHMETVKSAKRLDEGISVLRVPLTQLKLK |
| | GLEKMVNREREPKLYDALKAQLETHKDDPAKAFAEPFYKYDKAGSRTQQVKAVRIEQ |
| | VQKTGVWVRNHNGIADNATMVRVDVFEKGGKYYLVPIYSWQVAKGILPDRAVVAFK |
| | DEEDWTVMDDSFEFRFVLYANDLIKLTAKKNEFLGYFVSLNRATGAIDIRTHDTDSTK |
| | GKNGIFQSVGVKTALSFQKNQIDELGKEIRPCRLKKRPPVR (SEQ ID NO: 329) |
| N. meningitides | MAAFKPNPINYILGLDIGIASVGWAMVEIDEDENPICLIDLGVRVFERAEVPKTGDSLA |
| Cas9 | MARRLARSVRRLTRRRAHRLLRARRLLKREGVLQAADFDENGLIKSLPNTPWQLRAA |
| | ALDRKLTPLEWSAVLLHLIKHRGYLSQRKNEGETADKELGALLKGVADNAHALQTGD |
| | FRTPAELALNKFEKESGHIRNQRGDYSHTFSRKDLQAELILLFEKQKEFGNPHVSGGLK |
| | EGIETLLMTQRPALSGDAVQKMLGHCTFEPAEPKAAKNTYTAERFIWLTKLNNLRILE |
| | QGSERPLTDTERATLMDEPYRKSKLTYAQARKLLGLEDTAFFKGLRYGKDNAEASTL |
| | MEMKAYHAISRALEKEGLKDKKSPLNLSPELQDEIGTAFSLFKTDEDITGRLKDRIQPEI |
| | LEALLKHISFDKFVQISLKALRRIVPLMEQGKRYDEACAEIYGDHYGKKNTEEKIYLPPI |
| | PADEIRNPVVLRALSQARKVINGVVRRYGSPARIHIETAREVGKSFKDRKEIEKRQEEN |
| | RKDREKAAAKFREYFPNFVGEPKSKDILKLRLYEQQHGKCLYSGKEINLGRLNEKGYV |
| | EIDHALPFSRTWDDSFNNKVLVLGSENQNKGNQTPYEYFNGKDNSREWQEFKARVET |
| | SRFPRSKKQRILLQKFDEDGFKERNLNDTRYVNRFLCQFVADRMRLTGKGKKRVFASN |
| | GQITNLLRGFWGLRKVRAENDRHHALDAVVVACSTVAMQQKITRFVRYKEMNAFDG |
| | KTIDKETGEVLHQKTHFPQPWEFFAQEVMIRVFGKPDGKPEFEEADTPEKLRTLLAEKL |
| | SSRPEAVHEYVTPLFVSRAPNRKMSGQGHMETVKSAKRLDEGVSVLRVPLTQLKLKD |
| | LEKMVNREREPKLYEALKARLEAHKDDPAKAFAEPFYKYDKAGNRTQQVKAVRVEQ |
| | VQKTGVWVRNHNGIADNATMVRVDVFEKGDKYYLVPIYSWQVAKGILPDRAVVQG |
| | KDEEDWQLIDDSFNFKFSLHPNDLVEVITKKARMFGYFASCHRGTGNINIRIHDLDHKI |
| | GKNGILEGIGVKTALSFQKYQIDELGKEIRPCRLKKRPPVR (SEQ ID NO: 330) |
| B. longum Cas9 | MLSRQLLGASHLARPVSYSYNVQDNDVHCSYGERCFMRGKRYRIGIDVGLNSVGLAA |
| | VEVSDENSPVRLLNAQSVIHDGGVDPQKNKEAITRKNMSGVARRTRRMRRRKRERLH |
| | KLDMLLGKFGYPVIEPESLDKPFEEWHVRAELATRYIEDDELRRESISIALRHMARHRG |
| | WRNPYRQVDSLISDNPYSKQYGELKEKAKAYNDDATAAEEESTPAQLVVAMLDAGY |
| | AEAPRLRWRTGSKKPDAEGYLPVRLMQEDNANELKQIFRVQRVPADEWKPLFRSVFY |
| | AVSPKGSAEQRVGQDPLAPEQARALKASLAFQEYRIANVITNLRIKDASAELRKLTVDE |
| | KQSIYDQLVSPSSEDITWSDLCDFLGFKRSQLKGVGSLTEDGEERISSRPPRLTSVQRIYE |
| | SDNKIRKPLVAWWKSASDNEHEAMIRLLSNTVDIDKVREDVAYASAIEFIDGLDDDAL |
| | TKLDSVDLPSGRAAYSVETLQKLTRQMLTTDDDLHEARKTLFNVTDSWRPPADPIGEP |
| | LGNPSVDRVLKNVNRYLMNCQQRWGNPVSVNIEHVRSSFSSVAFARKDKREYEKNNE |
| | KRSIFRSSLSEQLRADEQMEKVRESDLRRLEAIQRQNGQCLYCGRTITFRTCEMDHIVP |
| | RKGVGSTNTRTNFAAVCAECNRMKSNTPFAIWARSEDAQTRGVSLAEAKKRVTMFTF |
| | NPKSYAPREVKAFKQAVIARLQQTEDDAAIDNRSIESVAWMADELHRRIDWYFNAKQ |
| | YVNSASIDDAEAETMKTTVSVFQGRVTASARRAAGIEGKIHFIGQQSKTRLDRRHHAV |
| | DASVIAMMNTAAAQTLMERESLRESQRLIGLMPGERSWKEYPYEGTSRYESFHLWLD |
| | NMDVLLELLNDALDNDRIAVMQSQRYVLGNSIAHDATIHPLEKVPLGSAMSADLIRRA |
| | STPALWCALTRLPDYDEKEGLPEDSHREIRVHDTRYSADDEMGFFASQAAQIAVQEGS |
| | ADIGSAIHHARVYRCWKTNAKGVRKYFYGMIRVFQTDLLRACHDDLFTVPLPPQSISM |
| | RYGEPRVVQALQSGNAQYLGSLVVGDEIEMDFSSLDVDGQIGEYLQFFSQFSGGNLAW |
| | KHWVVDGFFNQTQLRIRPRYLAAEGLAKAFSDDVVPDGVQKIVTKQGWLPPVNTASK |
| | TAVRIVRRNAFGEPRLSSAHHMPCSWQWRHE (SEQ ID NO: 331) |
| A. muciniphila Cas9 | MSRSLTFSFDIGYASIGWAVIASASHDDADPSVCGCGTVLFPKDDCQAFKRREYRRLRR |
| | NIRSRRVRIERIGRLLVQAQIITPEMKETSGHPAPFYLASEALKGHRTLAPIELWHVLRW |
| | YAHNRGYDNNASWSNSLSEDGGNGEDTERVKHAQDLMDKHGTATMAETICRELKLE |
| | EGKADAPMEVSTPAYKNLNTAFPRLIVEKEVRRILELSAPLIPGLTAEIIELIAQHHPLTT |
| | EQRGVLLQHGIKLARRYRGSLLFGQLIPRFDNRIISRCPVTWAQVYEAELKKGNSEQSA |
| | RERAEKLSKVPTANCPEFYEYRMARILCNIRADGEPLSAEIRRELMNQARQEGKLTKAS |
| | LEKAISSRLGKETETNVSNYFTLHPDSEEALYLNPAVEVLQRSGIGQILSPSVYRIAANR |
| | LRRGKSVTPNYLLNLLKSRGESGEALEKKIEKESKKKEADYADTPLKPKYATGRAPYA |
| | RTVLKKVVEEILDGEDPTRPARGEAHPDGELKAHDGCLYCLLDTDSSVNQHQKERRL |
| | DTMTNNHLVRHRMLILDRLLKDLIQDFADGQKDRISRVCVEVGKELTTFSAMDSKKIQ |
| | RELTLRQKSHTDAVNRLKRKLPGKALSANLIRKCRIAMDMNWTCPFTGATYGDHELE |
| | NLELEHIVPHSFRQSNALSSLVLTWPGVNRMKGQRTGYDFVEQEQENPVPDKPNLHIC |
| | SLNNYRELVEKLDDKKGHEDDRRRKKKRKALLMVRGLSHKHQSQNHEAMKEIGMTE |
| | GMMTQSSHLMKLACKSIKTSLPDAHIDMIPGAVTAEVRKAWDVFGVFKELCPEAADP |
| | DSGKILKENLRSLTHLHHALDACVLGLIPYIIPAHHNGLLRRVLAMRRIPEKLIPQVRPV |
| | ANQRHYVLNDDGRMMLRDLSASLKENIREQLMEQRVIQHVPADMGGALLKETMQRV |
| | LSVDGSGEDAMVSLSKKKDGKKEKNQVKASKLVGVFPEGPSKLKALKAAIEIDGNYG |
| | VALDPKPVVIRHIKVFKRIMALKEQNGGKPVRILKKGMLIHLTSSKDPKHAGVWRIESI |
| | QDSKGGVKLDLQRAHCAVPKNKTHECNWREVDLISLLKKYQMKRYPTSYTGTPR |
| | (SEQ ID NO: 332) |
| O. laneus Cas9 | METTLGIDLGTNSIGLALVDQEEHQILYSGVRIFPEGINKDTIGLGEKEESRNATRRAKR |
| | QMRRQYFRKKLRKAKLLELLIAYDMCPLKPEDVRRWKNWDKQQKSTVRQFPDTPAF |
| | REWLKQNPYELRKQAVTEDVTRPELGRILYQMIQRRGFLSSRKGKEEGKIFTGKDRMV |
| | GIDETRKNLQKQTLGAYLYDIAPKNGEKYRFRTERVRARYTLRDMYIREFEIIWQRQA |
| | GHLGLAHEQATRKKNIFLEGSATNVRNSKLITHLQAKYGRGHVLIEDTRITVITQLPLK |
| | EVLGGKIEIEEEQLKFKSNESVLFWQRPLRSQKSLLSKCVFEGRNFYDPVHQKWIIAGPT |
| | PAPLSHPEFEEFRAYQFINNITYGKNEHLTAIQREAVFELMCTESKDFINTEKIPKHLKLFE |
| | KFNFDDTTKVPACTTISQLRKLFPHPVWEEKREEIWHCFYFYDDNTLLFEKLQKDYAL |
| | QTNDLEKIKKIRLSESYGNVSLKAIRRINPYLKKGYAYSTAVLLGGIRNSFGKREENFKE |
| | YEPEIEKAVCRILKEKNAEGEVIRKIKDYLVHNRFGFAKNDRAFQKLYHHSQAITTQAQ |
| | KERLPETGNLRNPIVQQGLNELRRTVNKLLATCREKYGPSFKFDHIHVEMGRELRSSKT |
| | EREKQSRQIRENEKKNEAAKVKLAEYGLKAYRDNIQKYLLYKEIEEKGGTVCCPYTGK |
| | TLNISHTLGSDNSVQIEHIIPYSISLDDSLANKTLCDATFNREKGELTPYDFYQKDPSPEK |
| | WGASSWEEIEDRAFRLLPYAKAQRFIRRKPQESNEFISRQLNDTRYISKKAVEYLSAICS |
| | DVKAFPGQLTAELRHLWGLNNILQSAPDITFPLPVSATENHREYYVITNEQNEVIRLFPK |
| | QGETPRIIKGELLLTGEVERKVFRCKGMQEFQTDVSDGKYWRRIKLSSSVTWSPLFAP |
| | KPISADGQIVLKGRIEKGVFVCNQLKQKLKTGLPDGSYWISLPVISQTFKEGESVNNSKL |
| | TSQQVQLFGRVREGIFRCHNYQCPASGADGNFWCTLDTDTAQPAFTPIKNAPPGVGGG |
| | QIILTGDVDDKGIFHADDDLHYELPASLPKGKYYGIFTVESCDPTLIPIELSAPKTSKGEN |
| | LIEGNIWVDEHTGEVRFDPKKNREDQRHHAIDAIVIALSSQSLFQRLSTYNARRENKKR |
| | GLDSTEHFPSPWPGFAQDVRQSVVPLLVSYKQNPKTLCKISKTLYKDGKKIHSCGNAV |
| | RGQLHKETVYGQRTAPGAIIKSYHIRKDIRELKTSKHIGKVVDITIRQMLLKHLQENY |
| | HIDITQEFNIPSNAFFKEGVYRIFLPNKHGEPVPIKKIRMKEELGNAERLKDNINQYVNP |
| | RNNHHVMIYQDADGNLKEEIVSFWSVIERQNQGQPIYQLPREGRNIVSILQINDTFLIGL |
| | KEEEPEVYRNDLSTLSKHLYRVQKLSGMYYTFRHHLASTLNNEREEFRIQSLEAWKRA |
| | NPVKVQIDEIGRITFLNGPLC (SEQ ID NO: 333) |

[0088] Nuclease deficient S. pyogenes Cas9 proteins may comprise a substitution of an Alanine (A) for an Aspartic Acid (D) at position 10 and an alanine (A) for a Histidine (H) at position 840. Exemplary nuclease deficient S. pyogenes Cas9 proteins of the disclosure may comprise or consist of the amino acid sequence (D10A and H840A bolded and underlined):

(SEQ ID NO: 334)

| | |
|---|---|
| 1 | MDKKYSIGLA IGTNSVGWAV ITDEYKVPSK KFKVLGNTDR |
| | HSIKKNLIGA LLFDSGETAE |
| 61 | ATRLKRTARR RYTRRKNRIC YLQEIFSNEM AKVDDSFFHR |
| | LEESFLVEED KKHERHPIFG |
| 121 | NIVDEVAYHE KYPTIYHLRK KLVDSTDKAD LRLIYLALAH |
| | MIKFRGHFLI EGDLNPDNSD |
| 181 | VDKLFIQLVQ TYNQLFEENP INASGVDAKA ILSARLSKSR |
| | RLENLIAQLP GEKKNGLFGN |
| 241 | LIALSLGLTP NFKSNFDLAE DAKLQLSKDT YDDDLDNLLA |
| | QIGDQYADLF LAAKNLSDAI |
| 301 | LLSDILRVNT EITKAPLSAS MIKRYDEHHQ DLTLLKALVR |
| | QQLPEKYKEI FFDQSKNGYA |
| 361 | GYIDGGASQE EFYKFIKPIL EKMDGTEELL VKLNREDLLR |
| | KQRTFDNGSI PHQIHLGELH |
| 421 | AILRRQEDFY PFLKDNREKI EKILTFRIPY YVGPLARGNS |
| | RFAWMTRKSE ETITPWNFEE |
| 481 | VVDKGASAQS FIERMTNFDK NLPNEKVLPK HSLLYEYFTV |
| | YNELTKVKYV TEGMRKPAFL |
| 541 | SGEQKKAIVD LLFKTNRKVT VKQLKEDYFK KIECFDSVEI |
| | SGVEDRFNAS LGTYHDLLKI |
| 601 | IKDKDFLDNE ENEDILEDIV LTLTLFEDRE MIEERLKTYA |
| | HLFDDKVMKQ LKRRRYTGWG |
| 661 | RLSRKLINGI RDKQSGKTIL DFLKSDGFAN RNFMQLIHDD |
| | SLTFKEDIQK AQVSGQGDSL |
| 721 | HEHIANLAGS PAIKKGILQT VKVVDELVKV MGRHKPENIV |
| | IEMARENQTT QKGQKNSRER |
| 781 | MKRIEEGIKE LGSQILKEHP VENTQLQNEK LYLYYLQNGR |
| | DMYVDQELDI NRLSDYDVDA |
| 841 | IVPQSFLKDD SIDNKVLTRS DKNRGKSDNV PSEEVVKKMK |
| | NYWRQLLNAK LITQRKFDNL |
| 901 | TKAERGGLSE LDKAGFIKRQ LVETRQITKH VAQILDSRMN |
| | TKYDENDKLI REVKVITLKS |
| 961 | KLVSDFRKDF QFYKVREINN YHHAHDAYLN AVVGTALIKK |
| | YPKLESEFVY GDYKVYDVRK |
| 1021 | MIAKSEQEIG KATAKYFFYS NIMNFFKTEI TLANGEIRKR |
| | PLIETNGETG EIVWDKGRDF |
| 1081 | ATVRKVLSMP QVNIVKKTEV QTGGFSKESI LPKRNSDKLI |
| | ARKKDWDPKK YGGFDSPTVA |
| 1141 | YSVLVVAKVE KGKDKKLKSV KELLGITIME RSSFEKNPID |
| | FLEAKGYKEV KKDLIIKLPK |
| 1201 | YSLFELENGR KRMLASAGEL QKGNELALPS KYVNFLYLAS |
| | HYEKLKGSPE DNEQKQLFVE |
| 1261 | QHKHYLDEII EQISEFSKRV ILADANLDKV LSAYNKHRDK |
| | PIREQAENII HLFTLTNLGA |
| | PAAFKYFDTT IDRKRYTSTK EVLDATLIHQ SITGLYETRI |
| | DLSQLGGD. |

[0089] Exemplary wild type Francisella tularensis subsp. Novicida Cpf1 (FnCpf1) proteins of the disclosure may comprise or consist of the amino acid sequence:

(SEQ ID NO: 335)

| | |
|---|---|
| 1 | MSIYQEFVNK YSLSKTLRFE LIPQGKTLEN IKARGLILDD |
| | EKRAKDYKKA KQIIDKYHQF |
| 61 | FIEEILSSVC ISEDLLQNYS DVYFKLKKSD DDNLQKDFKS |
| | AKDTIKKQIS EYIKDSEKFK |
| 121 | NLFNQNLIDA KKGQESDLIL WLKQSKDNGI ELFKANSDIT |
| | DIDEALEIIK SFKGWTTYFK |
| 181 | GFHENRKNVY SSNDIPTSII YRIVDDNLPK FLENKAKYES |
| | LKDKAPEAIN YEQIKKDLAE |
| 241 | ELTFDIDYKT SEVNQRVFSL DEVFEIANFN NYLNQSGITK |
| | FNTIIGGKFV NGENTKRKGI |
| 301 | NEYINLYSQQ INDKTLKKYK MSVLFKQILS DTESKSFVID |
| | KLEDDSDVVT TMQSFYEQIA |
| 361 | AFKTVEEKSI KETLSLLFDD LKAQKLDLSK IYFKNDKSLT |
| | DLSQQVFDDY SVIGTAVLEY |
| 421 | ITQQIAPKNL DNPSKKEQEL IAKKTEKAKY LSLETIKLAL |
| | EEFNKHRDID KQCRFEEILA |
| 481 | NFAAIPMIFD EIAQNKDNLA QISIKYQNQG KKDLLQASAE |
| | DDVKAIKDLL DQTNNLLHKL |
| 541 | KIFHISQSED KANILDKDEH FYLVFEECYF ELANIVPLYN |
| | KIRNYITQKP YSDEKFKLNF |
| 601 | ENSTLANGWD KNKEPDNTAI LFIKDDKYYL GVMNKKNNKI |
| | FDDKAIKENK GEGYKKIVYK |
| 661 | LLPGANKMLP KVFFSAKSIK FYNPSEDILR IRNHSTHTKN |
| | GSPQKGYEKF EFNIEDCRKF |
| 721 | IDFYKQSISK HPEWKDFGFR FSDTQRYNSI DEFYREVENQ |
| | GYKLTFENIS ESYIDSVVNQ |
| 781 | GKLYLFQIYN KDFSAYSKGR PNLHTLYWKA LFDERNLQDV |
| | VYKLNGEAEL FYRKQSIPKK |
| 841 | ITHPAKEAIA NKNKDNPKKE SVFEYDLIKD KRFTEDKFFF |
| | HCPITINFKS SGANKFNDEI |
| 901 | NLLLKEKAND VHILSIDRGE RHLAYYTLVD GKGNIIKQDT |
| | FNIIGNDRMK TNYHDKLAAI |
| 961 | EKDRDSARKD WKKINNIKEM KEGYLSQVVH EIAKLVIEYN |
| | AIVVFEDLNF GFKRGRFKVE |
| 1021 | KQVYQKLEKM LIEKLNYLVF KDNEFDKTGG VLRAYQLTAP |
| | FETFKKMGKQ TGIIYYVPAG |
| 1081 | FTSKICPVTG FVNQLYPKYE SVSKSQEFFS KFDKICYNLD |
| | KGYFEFSFDY KNFGDKAAKG |
| 1141 | KWTIASFGSR LINFRNSDKN HNWDTREVYP TKELEKLLKD |
| | YSIEYGHGEC IKAAICGESD |
| 1201 | KKFFAKLTSV LNTILQMRNS KTGTELDYLI SPVADVNGNF |
| | FDSRQAPKNM PQDADANGAY |
| 1261 | HIGLKGLMLL GRIKNNQEGK KLNLVIKNEE YFEFVQNRNN |

[0090] Exemplary wild type Lachnospiraceae bacterium sp. ND2006 Cpf1 (LbCpf1) proteins of the disclosure may comprise or consist of the amino acid sequence:

(SEQ ID NO: 336)

| | |
|---|---|
| 1 | AASKLEKFTN CYSLSKTLRF KAIPVGKTQE NIDNKRLLVE |
| | DEKRAEDYKG VKKLLDRYYL |
| 61 | SFINDVLHSI KLKNLNNYIS LFRKKTRTEK ENKELENLEI |
| | NLRKEIAKAF KGAAGYKSLF |
| 121 | KKDIIETILP EAADDKDEIA LVNSFNGFTT AFTGFFDNRE |
| | NMFSEEAKST SIAFRCINEN |
| 181 | LTRYISNMDI FEKVDAIFDK HEVQEIKEKI LNSDYDVEDF |
| | FEGEFFNFVL TQEGIDVYNA |
| 241 | IIGGFVTESG EKIKGLNEYI NLYNAKTKQA LPKFKPLYKQ |
| | VLSDRESLSF YGEGYTSDEE |
| 301 | VLEVFRNTLN KNSEIFSSIK KLEKLFKNFD EYSSAGIFVK |
| | NGPAISTISK DIFGEWNLIR |
| 361 | DKWNAEYDDI HLKKKAVVTE KYEDDRRKSF KKIGSFSLEQ |
| | LQEYADADLS VVEKLKEIII |
| 421 | QKVDEIYKVY GSSEKLFDAD FVLEKSLKKN DAVVAIMKDL |
| | LDSVKSFENY IKAFFGEGKE |
| 481 | TNRDESFYGD FVLAYDILLK VDHIYDAIRN YVTQKPYSKD |
| | KFKLYFQNPQ FMGGWDKDKE |
| 541 | TDYRATILRY GSKYYLAIMD KKYAKCLQKI DKDDVNGNYE |
| | KINYKLLPGP NKMLPKVFFS |
| 601 | KKWMAYYNPS EDIQKIYKNG TFKKGDMFNL NDCHKLIDFF |
| | KDSISRYPKW SNAYDFNFSE |
| 661 | TEKYKDIAGF YREVEEQGYK VSFESASKKE VDKLVEEGKL |
| | YMFQIYNKDF SDKSHGTPNL |
| 721 | HTMYFKLLFD ENNHGQIRLS GGAELFMRRA SLKKEELVVH |
| | PANSPIANKN PDNPKKTTTL |
| 781 | SYDVYKDKRF SEDQYELHIP IAINKCPKNI FKINTEVRVL |
| | LKHDDNPYVI GIDRGERNLL |
| 841 | YIVVVDGKGN IVEQYSLNEI INNFNGIRIK TDYHSLLDKK |
| | EKERFEARQN WTSIENIKEL |
| 901 | KAGYISQVVH KICELVEKYD AVIALEDLNS GFKNSRVKVE |
| | KQVYQKFEKM LIDKLNYMVD |
| 961 | KKSNPCATGG ALKGYQITNK FESFKSMSTQ NGFIFYIPAW |
| | LTSKIDPSTG FVNLLKTKYT |
| 1021 | SIADSKKFIS SFDRIMYVPE EDLFEFALDY KNFSRTDADY |
| | IKKWKLYSYG NRIRIFAAAK |
| 1081 | KNNVFAWEEV CLTSAYKELF NKYGINYQQG DIRALLCEQS |
| | DKAFYSSFMA LMSLMLQMRN |
| 1141 | SITGRTDVDF LISPVKNSDG IFYDSRNYEA QENAILPKNA |
| | DANGAYNIAR KVLWAIGQFK |
| 1201 | KAEDEKLDKV KIAISNKEWL EYAQTSVK |

[0091] Exemplary wild type Acidaminococcus sp. BV3L6 Cpf1 (AsCpf1) proteins of the disclosure may comprise or consist of the amino acid sequence:

(SEQ ID NO: 337)

| | |
|---|---|
| 1 | MTQFEGFTNL YQVSKTLRFE LIPQGKTLKH IQEQGFIEED |
| | KARNDHYKEL KPIIDRIYKT |
| 61 | YADQCLQLVQ LDWENLSAAI DSYRKEKTEE TRNALIEEQA |
| | TYRNAIHDYF IGRTDNLTDA |
| 121 | INKRHAEIYK GLFKAELFNG KVLKQLGTVT TTEHENALLR |
| | SFDKFTTYFS GFYENRKNVF |
| 181 | SAEDISTAIP HRIVQDNFPK FKENCHIFTR LITAVPSLRE |
| | HFENVKKAIG IFVSTSIEEV |
| 241 | FSFPFYNQLL TQTQIDLYNQ LLGGISREAG TEKIKGLNEV |
| | LNLAIQKNDE TAHIIASLPH |
| 301 | RFIPLFKQIL SDRNTLSFIL EEFKSDEEVI QSFCKYKTLL |
| | RNENVLETAE ALFNELNSID |
| 361 | LTHIFISHKK LETISSALCD HWDTLRNALY ERRISELTGK |
| | ITKSAKEKVQ RSLKHEDINL |
| 421 | QEIISAAGKE LSEAFKQKTS EILSHAHAAL DQPLPTTLKK |
| | QEEKEILKSQ LDSLLGLYHL |
| 481 | LDWFAVDESN EVDPEFSARL TGIKLEMEPS LSFYNKARNY |
| | ATKKPYSVEK FKLNFQMPTL |
| 541 | ASGWDVNKEK NNGAILFVKN GLYYLGIMPK QKGRYKALSF |
| | EPTEKTSEGF DKMYYDYFPD |
| 601 | AAKMIPKCST QLKAVTAHFQ THTTPILLSN NFIEPLEITK |
| | EIYDLNNPEK EPKKFQTAYA |
| 661 | KKTGDQKGYR EALCKWIDFT RDFLSKYTKT TSIDLSSLRP |
| | SSQYKDLGEY YAELNPLLYH |
| 721 | ISFQRIAEKE IMDAVETGKL YLFQIYNKDF AKGHHGKPNL |
| | HTLYWTGLFS PENLAKTSIK |
| 781 | LNGQAELFYR PKSRMKRMAH RLGEKMLNKK LKDQKTPIPD |
| | TLYQELYDYV NHRLSHDLSD |
| 841 | EARALLPNVI TKEVSHEIIK DRRFTSDKFF FHVPITLNYQ |
| | AANSPSKFNQ RVNAYLKEHP |
| 901 | ETPIIGIDRG ERNLIYITVI DSTGKILEQR SLNTIQQFDY |
| | QKKLDNREKE RVAARQAWSV |
| 961 | VGTIKDLKQG YLSQVIHEIV DLMIHYQAVV VLENLNFGFK |
| | SKRTGIAEKA VYQQFEKMLI |
| 1021 | DKLNCLVLKD YPAEKVGGVL NPYQLTDQFT SFAKMGTQSG |
| | FLFYVPAPYT SKIDPLTGFV |
| 1081 | DPFVWKTIKN HESRKHFLEG FDFLHYDVKT GDFILHFKMN |
| | RNLSFQRGLP GFMPAWDIVF |
| 1141 | EKNETQFDAK GTPFIAGKRI VPVIENHRFT GRYRDLYPAN |
| | ELIALLEEKG IVFRDGSNIL |
| 1201 | PKLLENDDSH AIDTMVALIR SVLQMRNSNA ATGEDYINSP |
| | VRDLNGVCFD SRFQNPEWPM |
| 1261 | DADANGAYHI ALKGQLLLNH LKESKDLKLQ NGISNQDWLA |
| | YIQELRN |

[0092] In some embodiments of the compositions of the disclosure, the sequence encoding the RNA binding protein comprises a sequence isolated or derived from a CRISPR Cas protein or RNA-binding portion thereof. In some embodiments, the CRISPR Cas protein comprises a Type VI CRISPR Cas protein. In some embodiments, the Type VI CRISPR Cas protein comprises a Cas13 protein. Exemplary Cas13 proteins of the disclosure may be isolated or derived from any species, including, but not limited to, bacteria or archaea. Exemplary Cas13 proteins of the disclosure may be isolated or derived from any species, including, but not limited to, Leptotrichia wadei, Listeria seeligeri serovar 1/2b (strain ATCC 35967/DSM 20751/CIP 100100/SLCC 3954). Lachnospiraceae bacterium, Clostridium aminophilum DSM 10710, Carnobacterium gallinarum DSM 4847, Paludibacter propionicigenes WB4. Listeria weihenstephanensis FSL R9-0317, Listeria weihenstephanensis FSL R9-0317, bacterium FSL M6-0635 (Listeria newyorkensis), Leptotrichia wadei F0279, Rhodobacter capsulatus SB 1003, Rhodobacter capsulatus R121, Rhodobacter capsulatus DE442 and Corynebacterium ulcerans. Exemplary Cas13 proteins of the disclosure may be DNA nuclease inactivated. Exemplary Cas13 proteins of the disclosure include, but are not limited to, Cas13a, Cas13b, Cas13c, Cas13d, and orthologs thereof. Exemplary Cas13b proteins of the disclosure include, but are not limited to, subtypes 1 and 2 referred to herein as Csx27 and Csx28, respectively.

[0093] Exemplary Cas13a proteins include, but are not limited to:

| Cas13a | Cas13a | | |
|---|---|---|---|
| number | abbreviation | Organism name | Accession number |
| Cas13a1 | LshCas13a | Leptotrichia shahii | WP_018451595.1 (SEQ ID NO: 338) |
| Cas13a2 | LwaCas13a | Leptotrichia wadei | WP_021746774.1 (SEQ ID NO: 339) |
| Cas13a3 | LseCas13a | Listeria seeligeri | WP_012985477.1 (SEQ ID NO: 340) |
| Cas13a4 | LbmCas13a | Lachnospiraceae bacterium | WP_044921188.1 (SEQ ID NO: 341) |
| | | MA2020 | |
| Cas13a5 | LbnCas13a | Lachnospiraceae bacterium | WP_022785443.1 (SEQ ID NO: 342) |
| | | NK4A179 | |
| Cas13a6 | CamCas13a | [Clostridium] aminophilum | WP_031473346.1 (SEQ ID NO: 343) |
| | | DSM 10710 | |
| Cas13a7 | CgaCas13a | Carnobacterium gallinarum | WP_034560163.1 (SEQ ID NO: 344) |
| | | DSM 4847 | |
| Cas13a8 | Cga2Cas13a | Carnobacterium gallinarum | WP_034563842.1 (SEQ ID NO: 345) |
| | | DSM 4847 | |
| Cas13a9 | Pprcas13a | Paludibacter propionicigenes | WP_013443710.1 (SEQ ID NO: 346) |
| | | WB4 | |
| Cas13a10 | LweCas13a | Listeria weihenstephanensis | WP_036059185.1 (SEQ ID NO: 347) |
| | | FSL R9-0317 | |
| Cas13a11 | LbfCas13a | Listeriaceae bacterium FSL | WP_036091002.1 (SEQ ID NO: 348) |
| | | M6-0635 (Listeria newyorkensis) | |
| Cas13a12 | Lwa2cas13a | Leptotrichia wadei F0279 | WP_021746774.1 (SEQ ID NO: 349) |
| Cas13a13 | RcsCas13a | Rhodobacter capsulatus | WP_013067728.1 (SEQ ID NO: 350) |
| | | SB 1003 | |
| Cas13a14 | RcrCas13a | Rhodobacter capsulatus R121 | WP_023911507.1 (SEQ ID NO: 351) |
| Cas13a15 | RcdCas13a | Rhodobacter capsulatus DE442 | WP_023911507.1 (SEQ ID NO: 352) |

[0094] Exemplary wild type Cas13a proteins of the disclosure may comprise or consist of the amino acid sequence:

(SEQ ID NO: 353)

| | |
|---|---|
| 1 | MGNLFGHKRW YEVRDKKDFK IKRKVKVKRN YDGNKYILNI |
| | NENNNKEKID NNKFIRKYIN |
| 61 | YKKNDNILKE FTRKFHAGNI LFKLKGKEGI IRIENNDDFL |
| | ETEEVVLYIE AYGKSEKLKA |
| 121 | LGITKKKIID EAIRQGITKD DKKIEIKRQE NEEEIEIDIR |
| | DEYTNKTLND CSIILRIIEN |
| 181 | DELETKKSIY EIFKNINMSL YKIIEKIIEN ETEKVFENRY |
| | YEEHLREKLL KDDKIDVILT |
| 241 | NFMEIREKIK SNLEILGFVK FYLNVGGDKK KSKNKKMLVE |
| | KILNINVDLT VEDIADFVIK |
| 301 | ELEFWNITKR IEKVKKVNNE FLEKRRNRTY IKSYVLLDKH |
| | EKFKIERENK KDKIVKFFVE |
| 361 | NIKNNSIKEK IEKILAEFKI DELIKKLEKE LKKGNCDTEI |
| | FGIFKKHYKV NFDSKKFSKK |
| 421 | SDEEKELYKI IYRYLKGRIE KILVNEQKVR LKKMEKIEIE |
| | KILNESILSE KILKRVKQYT |
| 481 | LEHIMYLGKL RHNDIDMTTV NTDDFSRLHA KEELDLELIT |
| | FFASTNMELN KIFSRENINN |
| 541 | DENIDFFGGD REKNYVLDKK ILNSKIKIIR DLDFIDNKNN |
| | ITNNFIRKFT KIGTNERNRI |
| 601 | LHAISKERDL QGTQDDYNKV INIIQNLKIS DEEVSKALNL |
| | DVVFKDKKNI ITKINDIKIS |
| 661 | EENNNDIKYL PSFSKVLPEI LNLYRNNPKN EPFDTIETEK |
| | IVLNALIYVN KELYKKLILE |
| 721 | DDLEENESKN IFLQELKKTL GNIDEIDENI IENYYKNAQI |
| | SASKGNNKAI KKYQKKVIEC |
| 781 | YIGYLRKNYE ELFDFSDFKM NIQEIKKQIK DINDNKTYER |
| | ITVKTSDKTI VINDDFEYII |
| 841 | SIFALLNSNA VINKIRNRFF ATSVWLNTSE YQNIIDILDE |
| | IMQLNTLRNE CITENWNLNL |
| 901 | EEFIQKMKEI EKDFDDFKIQ TKKEIFNNYY EDIKNNILTE |
| | FKDDINGCDV LEKKLEKIVI |
| 961 | FDDETKFEID KKSNILQDEQ RKLSNINKKD LKKKVDQYIK |
| | DKDQEIKSKI LCRIIFNSDF |
| 1021 | LKKYKKEIDN LIEDMESENE NKFQEIYYPK ERKNELYIYK |
| | KNLFLNIGNP NFDKIYGLIS |
| 1081 | NDIKMADAKF LFNIDGKNIR KNKISEIDAI LKNLNDKLNG |
| | YSKEYKEKYI KKLKENDDFF |
| 1141 | AKNIQNKNYK SFEKDYNRVS EYKKIRDLVE FNYLNKIESY |
| | LIDINWKLAI QMARFERDMH |
| 1201 | YIVNGLRELG IIKLSGYNTG ISRAYPKRNG SDGFYTTTAY |
| | YKFFDEESYK KFEKICYGFG |
| 1261 | IDLSENSEIN KPENESIRNY ISHFYIVRNP FADYSIAEQI |
| | DRVSNLLSYS TRYNNSTYAS |
| 1321 | VFEVFKKDVN LDYDELKKKF KLIGNNDILE RLMKPKKVSV |
| | LELESYNSDY IKNLIIELLT |
| 1381 | KIENTNDTL |

[0095] Exemplary Cas13b proteins include, but are not limited to:

| | Cas13b | Cas13b |
|---|---|---|
| Species | Accession | Size (aa) |
| Paludibacter propionicigenes WB4 | WP_013446107.1 | 1155 |
| | (SEQ ID NO: 354) | |
| Prevotella sp. P5-60 | WP_044074780.1 | 1091 |
| | (SEQ ID NO: 355) | |
| Prevotella sp. P4-76 | WP_044072147.1 | 1091 |
| | (SEQ ID NO: 356) | |
| Prevotella sp. P5-125 | WP_044065294.1 | 1091 |
| | (SEQ ID NO: 357) | |
| Prevotella sp. P5-119 | WP_042518169.1 | 1091 |
| | (SEQ ID NO: 358) | |
| Capnocytophaga canimorsus Cc5 | WP_013997271.1 | 1200 |
| | (SEQ ID NO: 359) | |
| Phaeodactylibacter xiamenensis | WP_044218239.1 | 1132 |
| | (SEQ ID NO: 360) | |
| Porphyromonas gingivalis W83 | WP_005873511.1 | 1136 |
| | (SEQ ID NO: 361) | |
| Porphyromonas gingivalis F0570 | WP_021665475.1 | 1136 |
| | (SEQ ID NO: 362) | |
| Porphyromonas gingivalis | WP_012458151.1 | 1136 |
| ATCC 33277 | (SEQ ID NO: 363) | |
| Porphyromonas gingivalis F0185 | ERJ81987.1 | 1136 |
| | (SEQ ID NO: 364) | |
| Porphyromonas gingivalis F0185 | WP_021677657.1 | 1136 |
| | (SEQ ID NO: 365) | |
| Porphyromonas gingivalis SJD2 | WP_023846767.1 | 1136 |
| | (SEQ ID NO: 366) | |
| Porphyromonas gingivalis F0568 | ERJ65637.1 | 1136 |
| | (SEQ ID NO: 367) | |
| Porphyromonas gingivalis W4087 | ERJ87335.1 | 1136 |
| | (SEQ ID NO: 368) | |
| Porphyromonas gingivalis W4087 | WP_021680012.1 | 1136 |
| | (SEQ ID NO: 369) | |
| Porphyromonas gingivalis F0568 | WP_021663197.1 | 1136 |
| | (SEQ ID NO: 370) | |
| Porphyromonas gingivalis | WP_061156637.1 | 1136 |
| | (SEQ ID NO: 371) | |
| Porphyromonas gulae | WP_039445055.1 | 1136 |
| | (SEQ ID NO: 372) | |
| Bacteroides pyogenes F0041 | ERI81700.1 | 1116 |
| | (SEQ ID NO: 373) | |
| Bacteroides pyogenes JCM 10003 | WP_034542281.1 | 1116 |
| | (SEQ ID NO: 374) | |
| Alistipes sp. ZOR0009 | WP_047447901.1 | 954 |
| | (SEQ ID NO: 375) | |
| Flavobacterium branchiophilum | WP_014084666.1 | 1151 |
| FL-15 | (SEQ ID NO: 376) | |
| Prevotella sp. MA2016 | WP_036929175.1 | 1323 |
| | (SEQ ID NO: 377) | |
| Myroides odoratimimus | EHO06562.1 | 1160 |
| CCUG 10230 | (SEQ ID NO: 378) | |
| Myroides odoratimimus | EKB06014.1 | 1158 |
| CCUG 3837 | (SEQ ID NO: 379) | |
| Myroides odoratimimus | WP_006265509.1 | 1158 |
| CCUG 3837 | (SEQ ID NO: 380) | |
| Myroides odoratimimus | WP_006261414.1 | 1158 |
| CCUG 12901 | (SEQ ID NO: 381) | |
| Myroides odoratimimus | EHO08761.1 | 1158 |
| CCUG 12901 | (SEQ ID NO: 382) | |
| Myroides odoratimimus | WP_058700060.1 | 1160 |
| (NZ_CP013690.1) | (SEQ ID NO: 383) | |
| Bergeyella zoohelcum | EKB54193.1 | 1225 |
| ATCC 43767 | (SEQ ID NO: 384) | |
| Capnocytophaga cynodegmi | WP_041989581.1 | 1219 |
| | (SEQ ID NO: 385) | |
| Bergeyella zoohelcum | WP_002664492.1 | 1225 |
| ATCC 43767 | (SEQ ID NO: 386) | |
| Flavobacterium sp. 316 | WP_045968377.1 | 1156 |
| | (SEQ ID NO: 387) | |
| Psychroflexus torquis | WP_015024765.1 | 1146 |
| ATCC 700755 | (SEQ ID NO: 388) | |
| Flavobacterium columnare | WP_014165541.1 | 1180 |
| ATCC 49512 | (SEQ ID NO: 389) | |
| Flavobacterium columnare | WP_060381855.1 | 1214 |
| | (SEQ ID NO: 390) | |
| Flavobacterium columnare | WP_063744070.1 | 1214 |
| | (SEQ ID NO: 391) | |
| Flavobacterium columnare | WP_065213424.1 | 1215 |
| | (SEQ ID NO: 392) | |
| Chryseobacterium sp. YR477 | WP_047431796.1 | 1146 |
| | (SEQ ID NO: 393) | |
| Riemerella anatipestifer ATCC | WP_004919755.1 | 1096 |
| 11845 = DSM 15868 | (SEQ ID NO: 394) | |
| Riemerella anatipestifer | WP_015345620.1 | 949 |
| RA-CH-2 | (SEQ ID NO: 395) | |
| Riemerella anatipestifer | WP_049354263.1 | 949 |
| | (SEQ ID NO: 396) | |
| Riemerella anatipestifer | WP_061710138.1 | 951 |
| | (SEQ ID NO: 397) | |
| Riemerella anatipestifer | WP_064970887.1 | 1096 |
| | (SEQ ID NO: 398) | |
| Prevotella saccharolytica | EKY00089.1 | 1151 |
| F0055 | (SEQ ID NO: 399) | |
| Prevotella saccharolytica | WP_051522484.1 | 1152 |
| JCM 17484 | (SEQ ID NO: 400) | |
| Prevotella buccae | EFU31981.1 | 1128 |
| ATCC 33574 | (SEQ ID NO: 401) | |
| Prevotella buccae | WP_004343973.1 | 1128 |
| ATCC 33574 | (SEQ ID NO: 402) | |
| Prevotella buccae D17 | WP_004343581.1 | 1128 |
| | (SEQ ID NO: 403) | |
| Prevotella sp. MSX73 | WP_007412163.1 | 1128 |
| | (SEQ ID NO: 404) | |
| Prevotella pallens | EGQ18444.1 | 1126 |
| ATCC 700821 | (SEQ ID NO: 405) | |
| Prevotella pallens | WP_006044833.1 | 1126 |
| ATCC 700821 | (SEQ ID NO: 406) | |
| Prevotella intermedia ATCC | WP_036860899.1 | 1127 |
| 25611 = DSM 20706 | (SEQ ID NO: 407) | |
| Prevotella intermedia | WP_061868553.1 | 1121 |
| | (SEQ ID NO: 408) | |
| Prevotella intermedia 17 | AFJ07523.1 | 1135 |
| | (SEQ ID NO: 409) | |
| Prevotella intermedia | WP_050955369.1 | 1133 |
| | (SEQ ID NO: 410) | |
| Prevotella intermedia | BAU18623.1 | 1134 |
| | (SEQ ID NO: 411) | |
| Prevotella intermedia ZT | KJJ86756.1 | 1126 |
| | (SEQ ID NO: 412) | |
| Prevotella aurantiaca | WP_025000926.1 | 1125 |
| JCM 15754 | (SEQ ID NO: 413) | |
| Prevotella pleuritidis F0068 | WP_021584635.1 | 1140 |
| | (SEQ ID NO: 414) | |
| Prevotella pleuritidis | WP_036931485.1 | 1117 |
| JCM 14110 | (SEQ ID NO: 415) | |
| Prevotella falsenii DSM | WP_036884929.1 | 1134 |
| 22864 = JCM 15124 | (SEQ ID NO: 416) | |
| Porphyromonas gulae | WP_039418912.1 | 1176 |
| | (SEQ ID NO: 417) | |
| Porphyromonas sp. | WP_039428968.1 | 1176 |
| COT-052 OH4946 | (SEQ ID NO: 418) | |
| Porphyromonas gulae | WP_039442171.1 | 1175 |
| | (SEQ ID NO: 419) | |
| Porphyromonas gulae | WP_039431778.1 | 1176 |
| | (SEQ ID NO: 420) | |
| Porphyromonas gulae | WP_046201018.1 | 1176 |
| | (SEQ ID NO: 421) | |
| Porphyromonas gulae | WP_039434803.1 | 1176 |
| | (SEQ ID NO: 422) | |
| Porphyromonas gulae | WP_039419792.1 | 1120 |
| | (SEQ ID NO: 423) | |
| Porphyromonas gulae | WP_039426176.1 | 1120 |
| | (SEQ ID NO: 424) | |
| Porphyromonas gulae | WP_039437199.1 | 1120 |
| | (SEQ ID NO: 425) | |
| Porphyromonas gingivalis | WP_013816155.1 | 1120 |
| TDC60 | (SEQ ID NO: 426) | |
| Porphyromonas gingivalis | WP_012458414.1 | 1120 |
| ATCC 33277 | (SEQ ID NO: 427) | |
| Porphyromonas gingivalis | WP_058019250.1 | 1176 |
| A7A1-28 | (SEQ ID NO: 428) | |
| Porphyromonas gingivalis | EOA10535.1 | 1176 |
| JCVI SC001 | (SEQ ID NO: 429) | |
| Porphyromonas gingivalis W50 | WP_005874195.1 | 1176 |
| | (SEQ ID NO: 430) | |
| Porphyromonas gingivalis | WP_052912312.1 | 1176 |
| | (SEQ ID NO: 431) | |
| Porphyromonas gingivalis AJW4 | WP_053444417.1 | 1120 |
| | (SEQ ID NO: 432) | |
| Porphyromonas gingivalis | WP_039417390.1 | 1120 |
| | (SEQ ID NO: 433) | |
| Porphyromonas gingivalis | WP_061156470.1 | 1120 |
| | (SEQ ID NO: 434) | |

[0096] Exemplary wild type Bergeyella zoohelcum ATCC 43767 Cas13b (BzCas13b) proteins of the disclosure may comprise or consist of the amino acid sequence:

(SEQ ID NO: 435)

| | |
|---|---|
| 1 | menktslgnn iyynpfkpqd ksyfagyfna amentdsvfr |
| | elgkrlkgke ytsenffdai |
| 61 | fkenislvey eryvkllsdy fpmarlldkk evpikerken |
| | fkknfkgiik avrdlrnfyt |
| 121 | hkehgeveit deifgvldem lkstvltvkk kkvktdktke |
| | ilkksiekql dilcqkkley |
| 181 | lrdtarkiee krrnqrerge kelvapfkys dkrddliaai |
| | yndafdvyid kkkdslkess |
| 241 | kakyntksdp qqeegdlkip iskngvvfll slfltkqeih |
| | afkskiagfk atvideatvs |
| 301 | eatvshgkns icfmatheif shlaykklkr kvrtaeinyg |
| | eaenaeqlsv yaketlmmqm |
| 361 | ldelskvpdv vyqnlsedvq ktfiedwney lkenngdvgt |
| | meeeqvihpv irkryedkfn |
| 421 | yfairfldef aqfptlrfqv hignylhdsr pkenlisdrr |
| | ikekitvfgr lselehkkal |
| 481 | fikntetned rehyweifpn pnydfpkeni svndkdfpia |
| | gsildrekqp vagkigikvk |
| 541 | llnqqyvsev dkavkahqlk qrkaskpsiq niieeivpin |
| | esnpkeaivf ggqptaylsm |
| 601 | ndihsilyef fdkwekkkek lekkgekelr keigkelekk |
| | ivgkiqaqiq qiidkdtnak |
| 661 | ilkpyqdgns taidkeklik dikqeqnilq klkdeqtvre |
| | keyndfiayq dknreinkvr |
| 721 | drnhkqylkd nlkrkypeap arkevlyyre kgkvavwlan |
| | dikrfmptdf knewkgeqhs |
| 781 | llqkslayye qckeelknll pekvfqhlpf klggyfqqky |
| | lyqfytcyld krleyisglv |
| 841 | qqaenfksen kvfkkvenec fkflkkqnyt hkeldarvqs |
| | ilgypifler gfmdekptii |
| 901 | kgktfkgnea lfadwfryyk eyqnfqtfyd tenyplvele |
| | kkqadrkrkt kiyqqkkndv |
| 961 | ftllmakhif ksvfkqdsid qfsledlyqs reerlgnqer |
| | arqtgerntn yiwnktvdlk |
| 1021 | lcdgkitven vklknvgdfi kyeydqrvqa flkyeeniew |
| | qaflikeske eenypyvver |
| 1081 | eieqyekvrr eellkevhli eeyilekvkd keilkkgdnq |
| | nfkyyilngl lkqlknedve |
| 1141 | sykvfnlnte pedvninqlk qeatdleqka fvltyirnkf |
| | ahnqlpkkef wdycqekygk |
| 1201 | iekektyaey faevfkkeke alik |

[0097] An exemplary nuclease deficient Cas13b (dCas13b) nucleic acid sequence with C-terminal nuclear export sequence is:

(SEQ ID NO: 436)
ATGaacatccccgctctggtggaaaaccagaagaagtactttggcacctacagcgtgatggccatgctgaacgct
cagaccgtgctggaccacatccagaaggtggccgatattgagggcgagcagaacgagaacaacgagaatctgtgg
tttcaccccgtgatgagccacctgtacaacgccaagaacggctacgacaagcagcccgagaaaaccatgttcatc
atcgagcggctgcagagctacttcccattcctgaagatcatggccgagaaccagagagagtacagcaacggcaag
tacaagcagaaccgcgtggaagtgaacagcaacgacatcttcgaggtgctgaagcgcgccttcggcgtgctgaag
atgtacagggacctgaccaacgcAtacaagacctacgaggaaaagctgaacgacggctgcgagttcctgaccagc
acagagcaacctctgagcggcatgatcaacaactactacacagtggccctgcggaacatgaacgagagatacggc
tacaagacagaggacctggccttcatccaggacaagcggttcaagttcgtgaaggacgcctacggcaagaaaaag
tcccaagtgaataccggattcttcctgagcctgcaggactacaacggcgacacacagaagaagctgcacctgagc
ggagtgggaatcgccctgctgatctgcctgttcctggacaagcagtacatcaacatctttctgagcaggctgccc
atcttctccagctacaatgcccagagcgaggaacggcggatcatcatcagatccttcggcatcaacagcatcaag
ctgcccaaggaccggatccacagcgagaagtccaacaagagcgtggccatggatatgctcaacgaagtgaagcgg
tgccccgacgagctgttcacaacactgtctgccgagaagcagtcccggttcagaatcatcagcgacgaccacaat
gaagtgctgatgaagcggagcagcgacagattcgtgcctctgctgctgcagtatatcgattacggcaagctgttc
gaccacatcaggttccacgtgaacatgggcaagctgagatacctgctgaaggccgacaagacctgcatcgacggc
cagaccagagtcagagtgatcgagcagcccctgaacggcttcggcagactggaagaggccgagacaatgcggaag
caagagaacggcaccttcggcaacagoggcatccggatcagagacttcgagaacatgaagcgggacgacgccaat
cctgccaactatccctacatcgtggacacctacacacactacatcctggaaaacaacaaggtcgagatgtttatc
aacgacaaagaggacagcgccccactgctgcccgtgatcgaggatgatagatacgtggtcaagacaatccccagc
tgccggatgagcaccctggaaattccagccatggccttccacatgfttctgttcggcagcaagaaaaccgagaag
ctgatcgtggacgtgcacaaccggtacaagagactgttccaggccatgcagaaagaagaagtgaccgccgagaat
atcgccagcttcggaatcgccgagagcgacctgcctcagaagatcctggatctgatcagcggcaatgcccacggc
aaggatgtggacgccttcatcagactgaccgtggacgacatgctgaccgacaccgagcggagaatcaagagattc
aaggacgaccggaagtccattcggagcgccgacaacaagatgggaaagagaggcttcaagcagatctccacaggc
aagctggccgacttcctggccaaggacatcgtgctgtttcagcccagcgtgaacgatggcgagaacaagatcacc
ggcctgaactaccggatcatgcagagcgccattgccgtgtacgatagcggcgacgattacgaggccaagcagcag
ttcaagctgatgttcgagaaggcccggctgatcggcaagggcacaacagagcctcatccatttctgtacaaggtg
ttcgcccgcagcatccccgccaatgccgtcgagttctacgagcgctacctgatcgagcggaagttctacctgacc
ggcctgtccaacgagatcaagaaaggcaacagagtggatgtgcccttcatcoggcgggaccagaacaagtggaaa
acacccgccatgaagaccctgggcagaatctacagcgaggatctgcccgtggaactgcccagacagatgttcgac
aatgagatcaagtcccacctgaagtccctgccacagatggaaggcatcgacttcaacaatgccaacgtgacctat
ctgatcgccgagtacatgaagagagtgctggacgacgacttccagaccttctaccagtggaaccgcaactaccgg
tacatggacatgcttaagggcgagtacgacagaaagggctccctgcagcactgcttcaccagcgtggaagagaga
gaaggcctctggaaagagcgggcctccagaacagagcggtacagaaagcaggccagcaacaagatccgcagcaac
cggcagatgagaaacgccagcagcgaagagatcgagacaatcctggataagcggctgagcaacagccggaacgag
taccagaaaagcgagaaagtgatccggcgctacagagtgcaggatgccctgctgtttctgctggccaaaaagacc
ctgaccgaactggccgatttcgacggcgagaggttcaaactgaaagaaatcatgcccgacgccgagaagggaatc
ctgagcgagatcatgcccatgagcttcaccttcgagaaaggcggcaagaagtacaccatcaccagcgagggcatg
aagctgaagaactacggcgacttctttgtgctggctagcgacaagaggatcggcaacctgctggaactcgtgggc
agcgacatcgtgtccaaagaggatatcatggaagagttcaacaaatacgaccagtgcaggcccgagatcagctcc
atcgtgttcaacctggaaaagtgggccttcgacacataccccgagctgtctgccagagtggaccgggaagagaag
gtggacttcaagagcatcctgaaaatcctgctgaacaacaagaacatcaacaaagagcagagcgacatcctgcgg
aagatccggaacgccttcgatgcAaacaattaccccgacaaaggcgtggtggaaatcaaggccctgcctgagatc
gccatgagcatcaagaaggcctttggggagtacgccatcatgaagggatccCTTCAACTGCCTCCACTTGAAAGA
CTGACACTGctcgagAGAGATTAG

[0098] An exemplary nuclease deficient Cas13b (dCas13b) nucleic acid sequence with stop codon (making it an independent reading frame) is as follows:

(SEQ ID NO: 437)
ATGaacatccccgctctggtggaaaaccagaagaagtactttggcacctacagcgtgatggccatgctgaacgct
cagaccgtgctggaccacatccagaaggtggccgatattgagggcgagcagaacgagaacaacgagaatctgtgg
tttcaccccgtgatgagccacctgtacaacgccaagaacggctacgacaagcagcccgagaaaaccatgttcatc
atcgagcggctgcagagctacttcccattcctgaagatcatggccgagaaccagagagagtacagcaacggcaag
tacaagcagaaccgcgtggaagtgaacagcaacgacatcttcgaggtgctgaagcgcgccttcggcgtgctgaag
atgtacagggacctgaccaacgcAtacaagacctacgaggaaaagctgaacgacggctgcgagttcctgaccagc
acagagcaacctctgagcggcatgatcaacaactactacacagtggccctgcggaacatgaacgagagatacggc
tacaagacagaggacctggccttcatccaggacaagoggttcaagftcgtgaaggacgcctacggcaagaaaaag
tcccaagtgaataccggattcttcctgagcctgcaggactacaacggcgacacacagaagaagctgcacctgagc
ggagtgggaatcgccctgctgatctgcctgttcctggacaagcagtacatcaacatctttctgagcaggctgccc
atcttctccagctacaatgcccagagcgaggaacggcggatcatcatcagatccttcggcatcaacagcatcaag
ctgcccaaggaccggatccacagcgagaagtccaacaagagcgtggccatggatatgctcaacgaagtgaagcgg
tgccccgacgagctgttcacaacactgtctgccgagaagcagtcccggttcagaatcatcagcgacgaccacaat
gaagtgctgatgaagcggagcagcgacagattcgtgcctctgctgctgcagtatatcgattacggcaagctgttc
gaccacatcaggttccacgtgaacatgggcaagctgagatacctgctgaaggccgacaagacctgcatcgacggc
cagaccagagtcagagtgatcgagcagcccctgaacggcttcggcagactggaagaggccgagacaatgcggaag
caagagaacggcaccttcggcaacagcggcatccggatcagagacttcgagaacatgaagcgggacgacgccaat
cctgccaactatccctacatcgtggacacctacacacactacatcctggaaaacaacaaggtcgagatgtttatc
aacgacaaagaggacagcgccccactgctgcccgtgatcgaggatgatagatacgtggtcaagacaatccccagc
tgccggatgagcaccctggaaattccagccatggccttccacatgtttctgttcggcagcaagaaaaccgagaag
ctgatcgtggacgtgcacaaccggtacaagagactgttccaggccatgcagaaagaagaagtgaccgccgagaat
atcgccagcttcggaatcgccgagagcgacctgcctcagaagatcctggatctgatcagcggcaatgcccacggc
aaggatgtggacgccttcatcagactgaccgtggacgacatgctgaccgacaccgagcggagaatcaagagattc
aaggacgaccggaagtccattcggagcgccgacaacaagatgggaaagagaggcttcaagcagatctccacaggc
aagctggccgacttcctggccaaggacatcgtgctgtttcagcccagcgtgaacgatggcgagaacaagatcacc
ggcctgaactaccggatcatgcagagcgccattgccgtgtacgatagcggcgacgattacgaggccaagcagcag
ttcaagctgatgttcgagaaggcccggctgatcggcaagggcacaacagagcctcatccatttctgtacaaggtg
ttcgcccgcagcatccccgccaatgccgtcgagttctacgagcgctacctgatcgageggaagttctacctgacc
ggcctgtccaacgagatcaagaaaggcaacagagtggatgtgcccttcatccggcgggaccagaacaagtggaaa
acacccgccatgaagaccctgggcagaatctacagcgaggatctgcccgtggaactgcccagacagatgttcgac
aatgagatcaagtcccacctgaagtccctgccacagatggaaggcatcgacttcaacaatgccaacgtgacctat
ctgatcgccgagtacatgaagagagtgctggacgacgacttccagaccttctaccagtggaaccgcaactaccgg
tacatggacatgcttaagggcgagtacgacagaaagggctccctgcagcactgcttcaccagcgtggaagagaga
gaaggcctctggaaagagcgggcctccagaacagagcggtacagaaagcaggccagcaacaagatccgcagcaac
cggcagatgagaaacgccagcagcgaagagatcgagacaatcctggataagcggctgagcaacagccggaacgag
taccagaaaagcgagaaagtgatccggcgctacagagtgcaggatgccctgctgtttctgctggccaaaaagacc
ctgaccgaactggccgatttcgacggcgagaggttcaaactgaaagaaatcatgcccgacgccgagaagggaatc
ctgagcgagatcatgcccatgagcttcaccttcgagaaaggcggcaagaagtacaccatcaccagcgagggcatg
aagctgaagaactacggcgacttctttgtgctggctagcgacaagaggatcggcaacctgctggaactcgtgggc
agcgacatcgtgtccaaagaggatatcatggaagagttcaacaaatacgaccagtgcaggcccgagatcagctcc
atcgtgttcaacctggaaaagtgggccttcgacacataccccgagctgtctgccagagtggaccgggaagagaag
gtggacttcaagagcatcctgaaaatcctgctgaacaacaagaacatcaacaaagagcagagcgacatcctgcgg
aagatccggaacgccttcgatgcAaacaattaccccgacaaaggcgtggtggaaatcaaggccctgcctgagatc
gccatgagcatcaagaaggcctttggggagtacgccatcatgaagTAG

[0099] Exemplary wild type Cas13d proteins of the disclosure may comprise or consist of the amino acid sequences:

| | |
|---|---|
| Cas13d (Ruminococcus | IEKKKSFAKGMGVKSTLVSGSKVYMTTFAEGSDARLEKIVEGDSI |
| flavefaciens XPD3002) | RSVNEGEAFSAEMADKNAGYKIGNAKFSHPKGYAVVANNPLYTGP |
| | VQQDMLGLKETLEKRYFGESADGNDNICIQVIHNILDIEKILAEY |
| | ITNAAYAVNNISGLDKDIIGFGKFSTVYTYDEFKDPEHHRAAFNN |
| | NDKLINAIKAQYDEFDNFLDNPRLGYFGQAFFSKEGRNYIINYGN |
| | ECYDILALLSGLAHWVVANNEEESRISRTWLYNLDKNLDNEYIST |
| | LNYLYDRITNELTNSFSKNSAANVNYIAETLGINPAEFAEQYFRF |
| | SIMKEQKNLGFNITKLREVMLDRKDMSEIRKNHKVFDSIRTKVYT |
| | MMDFVIYRYYIEEDAKVAAANKSLPDNEKSLSEKDIFVINLRGSF |
| | NDDQKDALYYDEANRIWRKLENIMHNIKEFRGNKTREYKKKDAPR |
| | LPRILPAGRDVSAFSKLMYALTMFLDGKEINDLLTTLINKFDNIQ |
| | SFLKVMPLIGVNAKFVEEYAFFKDSAKIADELRLIKSFARMGEPI |
| | ADARRAMYIDAIRILGTNLSYDELKALADTFSLDENGNKLKKGKH |
| | GMRNFIINNVISNKRFHYLIRYGDPAHLHEIAKNEAVVKFVLGRI |
| | ADIQKKQGQNGKNQIDRYYETCIGKDKGKSVSEKVDALTKIITGM |
| | NYDQFDKKRSVIEDTGRENAEREKFKKIISLYLTVIYHILKNIVN |
| | INARYVIGFHCVERDAQLYKEKGYDINLKKLEEKGFSSVTKLCAG |
| | IDETAPDKRKDVEKEMAERAKESIDSLESANPKLYANYIKYSDEK |
| | KAEEFTRQINREKAKTALNAYLRNTKWNVIIREDLLRIDNKTCTL |
| | FANKAVALEVARYVHAYINDIAEVNSYFQLYHYIMQRIIMNERYE |
| | KSSGKVSEYFDAVNDEKKYNDRLLKLLCVPFGYCIPRFKNLSIEA |
| | LFDRNEAAKFDKEKKSGNS (SEQ ID NO: 438) |
| Cas13d (contig e- | MKRQKTFAKRIGIKSTVAYGQGKYAITTFGKGSKAEIAVRSADPP |
| k87_11092736) | EETLPTESDATLSIHAKFAKAGRDGREFKCGDVDETRIHTSRSEY |
| | ESLISNPAESPREDYLGLKGTLERKFFGDEYPKDNLRIQIIYSIL |
| | DIQKILGLYVEDILHFVDGLQDEPEDLVGLGLGDEKMQKLLSKAL |
| | PYMGFFGSTDVFKVTKKREERAAADEHNAKVFRALGAIRQKLAHF |
| | KWKESLAIFGANANMPIRFFQGATGGRQLWNDVIAPLWKKRIERV |
| | RKSFLSNSAKNLWVLYQVFKDDTDEKKKARARQYYHFSVLKEGKN |
| | LGFNLTKTREYFLDKFFPIFHSSAPDVKRKVDTFRSKFYAILDFI |
| | IYEASVSVANSGQMGKVAPWKGAIDNALVKLREAPDEEAKEKIYN |
| | VLAASIRNDSLFLRLKSACDKFGAEQNRPVFPNELRNNRDIRNVR |
| | SEWLEATQDVDAAAFVQLIAFLCNFLEGKEINELVTALIKKFEGI |
| | QALIDLLRNLEGVDSIRFENEFALFNDDKGNMAGRIARQLRLLAS |
| | VGKMKPDMTDAKRVLYKSALEILGAPPDEVSDEWLAENILLDKSN |
| | NDYQKAKKTVNPFRNYIAKNVITSRSFYYLVRYAKPTAVRKLMSN |
| | PKIVRYVLKRLPEKQVASYYSAIWTQSESNSNEMVKLIEMIDRLT |
| | TEIAGFSFAVLKDKKDSIVSASRESRAVNLEVERLKKLTTLYMSI |
| | AYIAVKSLVKVNARYFIAYSALERDLYFFNEKYGEEFRLHFIPYE |
| | LNGKTCQFEYLAILKYYLARDEETLKRKCEICEEIKVGCEKHKKN |
| | ANPPYEYDQEWIDKKKALNSERKACERRLHFSTHWAQYATKRDEN |
| | MAKHPQKWYDILASHYDELLALQATGWLATQARNDAEHLNPVNEF |
| | DVYIEDLRRYPEGTPKNKDYHIGSYFEIYHYIRQRAYLEEVLAKR |
| | KEYRDSGSFTDEQLDKLQKILDDIRARGSYDKNLLKLEYLPFAYN |
| | LPRYKNLTTEALFDDDSVSGKKRVAEWREREKTREAEREQRRQR |
| | (SEQ ID NO: 439) |
| Cas13d (contig e- | GTGAGAAGTCTCCTTATGGGGAGATGCTAC (SEQ ID NO: |
| k87_11092736) Direct | 300) |
| Repeat Sequence | |
| Cas13d | MKNSVTFKLIQAQENKEAARKKAKDIAEQARIAKRNGVVKKEENR |
| (160582958_gene49834) | INRIQIEIQTQKKSNTQNAYHLKSLAKAAGVKSVFAIGNDLLMTG |
| | FGPGNDATIEKRVFQNRAIETLSSPEQYSAEFQNKQFKIKGNIKV |
| | LNHSTQKMEEIQTELQDNYNRPHFDLLGCKNVLEQKYFGRTFSDN |
| | IHVQIAYNIMDIEKLLTPYINNIIYTLNELMRDNSKDDFFGCDSH |
| | FSVAYLYDELKAGYSDRLKTKPNLSKNIDRIWNNFCNYMNSDSGN |
| | TEARLAYFGELFYKPKETGDAKSDYKTHLSNNQKEEWELKSDKEV |
| | YNIFAILCDLRHFCTHGESITPSGKPFPYNLEKNLFPEAKQVLNS |
| | LFEEKAESLGAEAFGKTAGKTDVSILLKVFEKEQASQKEQQALLK |
| | EYYDFKVQKTYKNMGFSIKKLREAIMEIPDAAKFKDDLYSSLRHK |
| | LYGLFDFILVKHFLDTSDSENLQNNDIFRQLRACRCEEEKDQVYR |
| | SIAVKVWEKVKKKELNMFKQVVVIPSLSKDELKQMEMTKNTELLS |
| | SIETISTQASLFSEMIFMMTYLLDGKEINLLCTSLIEKFENIASF |
| | NEVLKSPQIGYETKYTEGYAFFKNADKTAKELRQVNNMARMTKPL |
| | GGVNTKCVMYNEAAKILGAKPMSKAELESVFNLDNHDYTYSPSGK |
| | KIPNKNFRNFIINNVITSRRFLYLIRYGNPEKIRKIAINPSIISF |
| | VLKQIPDEQIKRYYPPCIGKRTDDVTLMRDELGKMLQSVNFEQFS |
| | RVNNKQNAKQNPNGEKARLQACVRLYLTVPYLFIKNMVNINARYV |
| | LAFHCLERDHALCFNSRKLNDDSYNEMANKFQMVRKAKKEQYEKE |
| | YKCKKQETGTAHTKKIEKLNQQIAYIDKDIKNMHSYTCRNYRNLV |
| | AHLNVVSKLQNYVSELPNDYQITSYFSFYHYCMQLGLMEKVSSKN |
| | IPLVESLKNEANDAQSYSAKKTLEYFDLIEKNRTYCKDFLKALNA |
| | PFSYNLPRFKNLSIEALFDKNIVYEQADLKKE (SEQ ID NO: |
| | 440) |
| Cas13d | GAACTACACCCCTCTGTTCTTGTAGGGGTCTAACAC (SEQ ID |
| (160582958_gene49834) | NO: 301) |
| Direct Repeat | |
| Sequence | |
| Cas13d (contig | MKKQKSKKTVSKTSGLKEALSVQGTVIMTSFGKGNMANLSYKIPS |
| tpg\|DJXD01000002.1\|; | SQKPQNLNSSAGLKNVEVSGKKIKFQGRHPKIATTDNPLFKPQPG |
| uncultivated | MDLLCLKDKLEMHYFGKTFDDNIHIQLIYQILDIEKILAVHVNNI |
| Ruminococcus | VFTLDNVLHPQKEELTEDFIGAGGWRINLDYQTLRGQTNKYDRFK |
| assembly UBA7013, | NYIKRKELLYFGEAFYHENERRYEEDIFAILTLLSALRQFCFHSD |
| from sheep gut | LSSDESDHVNSFWLYQLEDQLSDEFKETLSILWEEVTERIDSEFL |
| metagenome) | KTNTVNLHILCHVFPKESKETIVRAYYEFLIKKSFKNMGFSIKKL |
| | REIMLEQSDLKSFKEDKYNSVRAKLYKLFDFIITYYYDHHAFEKE |
| | ALVSSLRSSLTEENKEEIYIKTARTLASALGADFKKAAADVNAKN |
| | IRDYQKKANDYRISFEDIKIGNTGIGYFSELIYMLTLLLDGKEIN |
| | DLLTTLINKFDNIISFIDILKKLNLEFKFKPEYADFFNMTNCRYT |
| | LEELRVINSIARMQKPSADARKIMYRDALRILGMDNRPDEEIDRE |
| | LERTMPVGADGKFIKGKQGFRNFIASNVIESSRFHYLVRYNNPHK |
| | TRTLVKNPNVVKFVLEGIPETQIKRYFDVCKGQEIPPTSDKSAQI |
| | DVLARIISSVDYKIFEDVPQSAKINKDDPSRNFSDALKKQRYQAI |
| | VSLYLTVMYLITKNLVYVNSRYVIAFHCLERDAFLHGVTLPKMNK |
| | KIVYSQLTTHLLTDKNYTTYGHLKNQKGHRKWYVLVKNNLQNSDI |
| | TAVSSFRNIVAHISVVRNSNEYISGIGELHSYFELYHYLVQSMIA |
| | KNNWYDTSHQPKTAEYLNNLKKHHTYCKDFVKAYCIPFGYVVPRY |
| | KNLTINELFDRNNPNPEPKEEV (SEQ ID NO: 441) |
| Cas13d (contig | CAACTACAACCCCGTAAAAATACGGGGTTCTGAAAC (SEQ ID |
| tpg\|DJXD01000002.1\|; | NO: 442) |
| uncultivated | |
| Ruminococcus | |
| assembly, UBA7013, | |
| from sheep gut | |
| metagenome) | |
| Cas13d | SEQ ID NO: 443 |
| (Gut_metagenome_contig6049000251) | |
| Cas13d | SEQ ID NO: 444 |
| (Gut_metagenome_contig546000275) | |
| Cas13d | SEQ ID NO: 445 |
| (Gut_metagenome_contig4114000374) | |
| Cas13d | SEQ ID NO: 446 |
| (Gut_metagenome_contig721000619) | |
| Cas13d | SEQ ID NO: 447 |
| (Gut_metagenome_contig2002000411) | |
| Cas13d | SEQ ID NO: 448 |
| (Gut_metagenome_contig13552000311) | |
| Cas13d | SEQ ID NO: 449 |
| (Gut_metagenome_contig10037000527) | |
| Cas13d (293. Cas13d | SEQ ID NO: 450 |
| from | |
| Gut_metagenome_contig238000329) | |
| Cas13d | SEQ ID NO: 451 |
| (Gut_metagenome_contig2643000492) | |
| Cas13d | SEQ ID NO: 452 |
| (Gut_metagenome_contig874000057) | |
| Cas13d | SEQ ID NO: 453 |
| (Gut_metagenome_contig4781000489) | |
| Cas13d | SEQ ID NO: 454 |
| (Gut_metagenome_contig12144000352) | |
| Cas13d | SEQ ID NO: 455 |
| (Gut_metagenome_contig5590000448) | |
| Cas13d | SEQ ID NO: 456 |
| (Gut_metagenome_contig525000349) | |
| Cas13d | SEQ ID NO: 457 |
| (Gut_metagenome_contig7229000302) | |
| Cas13d | SEQ ID NO: 458 |
| (Gut_metagenome_contig3227000343) | |
| Cas13d | SEQ ID NO: 459 |
| (Gut_metagenome_contig7030000469) | |
| Cas13d | SEQ ID NO: 460 |
| (Gut_metagenome_P17E0k2120140920, | |
| _c87000043) | |
| Cas13d (Metagenomic | SEQ ID NO: 461 |
| hit (no protein | |
| accession): contig | |
| emb\|OBVH01003037.1, | |
| human gut | |
| metagenome sequence | |
| (also found in WGS | |
| contigs | |
| emb\|OBXZ01000094.1\| | |
| and | |
| emb\|OBJF01000033.1\|)) | |
| Cas13d (Metagenomic | SEQ ID NO: 462 |
| hit (no protein | |
| accession): contig | |
| OGZC01000639.1 | |
| (human gut | |
| metagenome | |
| assembly)) | |
| Cas13d (Metagenomic | SEQ ID NO: 463 |
| hit (no protein | |
| accession): contig | |
| emb\|OHBM01000764.1 | |
| (human gut | |
| metagenome | |
| assembly)) | |
| Cas13d (Metagenomic | SEQ ID NO: 464 |
| hit (no protein | |
| accession): contig | |
| emb\|OHCP01000044.1 | |
| (human gut | |
| metagenome | |
| assembly)) | |
| Cas13d (Metagenomic | SEQ ID NO: 465 |
| hit (no protein | |
| accession): contig | |
| emb\|OGDF01008514.1\| | |
| (human gut | |
| metagenome | |
| assembly)) | |
| Cas13d (Metagenomic | SEQ ID NO: 466 |
| hit (no protein | |
| accession): contig | |
| emb\|OGPN01002610.1 | |
| (human gut | |
| metagenome | |
| assembly)) | |
| Cas13d (Metagenomic | SEQ ID NO: 467 |
| hit (no protein | |
| accession): from contig | |
| emb\|OBLI01020244 | |
| and | |
| emb\|OBLI01038679 | |
| (from pig gut | |
| metagenome)) | |
| Cas13d (Metagenomic | SEQ ID NO: 468 |
| hit (no protein | |
| accession): contig | |
| OIZX01000427.1) | |
| Cas13d (Metagenomic | SEQ ID NO: 469 |
| hit (no protein | |
| accession): contig | |
| OCTW011587266.1) | |
| Cas13d (Metagenomic | SEQ ID NO: 470 |
| hit (no protein | |
| accession): contig | |
| emb\|OGNF01009141.1) | |
| Cas13d (Metagenomic | SEQ ID NO: 471 |
| hit (no protein | |
| accession): contig | |
| emb\|OIEN01002196.1\|) | |
| Cas13d | SEQ ID NO: 472 |
| (Ga0129306_1000735) | |
| Cas13d | SEQ ID NO: 473 |
| (Ga0129317_1008067) | |
| Cas13d | SEQ ID NO: 474 |
| (Ga0224415_10048792) | |
| Cas13d | SEQ ID NO: 475 |
| (250twins_35838_GL0110300) | |
| Cas13d | SEQ ID NO: 476 |
| (250twins_36050_GL0158985) | |

Additional exemplary Cas13d sequences and direct repeat sequences for Cas13d are listed as SEQ ID Nos: 1-277 in the corresponding sequence listing.

IV. Nucleic Acids Encoding the Capped-sgRNA and/or the Cas Polypeptide

[0100] Some embodiments disclosed herein provide compositions comprising a nucleic acid sequence encoding the capped-sgRNAs described herein, and vectors (e.g., expression vector(s)) comprising the nucleic acid sequences. In some embodiments, nucleic acid sequences encoding the capped-sgRNAs are operably linked to one or more promoters. Suitable promoters include, without limitation, RNA polymerase II promoters such as, without limitation, CMV, PGK, and EF1α promoters. In one embodiment, the RNA polymerase II promoter is an RNA Pol II transcribed non-coding RNA. The sgRNA is transcribed by the RNAase polymerase II, acquires an m7G cap and becomes polyadenylated. Additional promoters suitable for driving expression of the capped-sgRNA are also contemplated, such as, without limitation, bacteriophage promoters (e.g., RNA polymerase T3, T7, and SP6), ubiquitous promoters, tissue-specific promoters, inducible promoters, and constitutive promoters. For example, liver-specific promoters as described in PCT/US06/00668 are contemplated herein. For example, promoters for genes encoding genes encoding c-jun; jun-b; c-fos; c-myc; serum amyloid A; apolipoprotein B editing catalytic subunit; liver regeneration factors, such as LRF-I; signal transducers; activators of transcription, such as STAT-3; serum alkaline phosphates (SAP); insulin-like growth factor-binding proteins, such as IGFBP-I; cyclin D1; active protein-1; CCAAT enhancer core binding protein; ornithine decarboxylase; phosphatase of regenerating liver-1; early growth response gene-1; hepatocyte growth factors; hemopexin; insulin-like growth factors (IGF), such as IGF-I and IGF-2; hepatocyte nuclear family 1; hepatocyte nuclear family 4; hepatocyte Arg-Ser-rich domain-containing proteins; glucose 6-phosphatase; acute phase proteins, such as serum amyloid A and serum amyloid P (SAA/SAP); steroid hydroxylases; leukotriene hydroxylases; fatty acid hydroxylases; desmolase; peptidyl isomerases; and sterol demethylases.

[0101] In one embodiment, vectors comprising the nucleic acids that encode the capped-sgRNA further include a sequence that encodes a Cas polypeptide (e.g., any of the Cas polypeptides described herein, such as, without limitation, a truncated nuclease-deficient Cas protein). The capped-sgRNA and the Cas transcript can be transcribed from the same promoter, or from different promoters. RNA polymerase II promoters (e.g. CMV, PGK, and EF1α promoters), for example, are suitable for driving expression of both the sgRNA and the Cas gene. In some embodiments, the Cas transcript is expressed from one promoter, such as a PGK promoter, and the capped-sgRNA is expressed from a different promoter, such as an EF1α promoter.

[0102] Some embodiments disclosed herein provide nucleic acids encoding the Cas polypeptides and vectors comprising the nucleic acids that encode the Cas polypeptides. Nucleic acids encoding the Cas polypeptides can be operably linked to one or more promoters. Suitable promoters include RNA polymerase II promoters (e.g., CMV, PGK, and EF1α promoters), bacteriophage promoters (e.g., RNA polymerase T3, T7, and SP6), ubiquitous promoters, tissue-specific promoters, inducible promoters, and constitutive promoters. The Cas polypeptide can be associated with or include or be in operable linkage with a tag or detectable agent, such as a fluorescent agent, a fluorescent protein, an enzyme.

[0103] In some embodiments, a sequence encoding a capped-guide RNA of the disclosure includes a sequence encoding a promoter to drive expression of the guide RNA. In some embodiments, a vector that includes a sequence encoding a capped-guide RNA of the disclosure includes a sequence encoding a promoter to drive expression of the guide RNA. In some embodiments, a promoter driving expression of the guide RNA includes a sequence encoding a constitutive promoter, or an inducible promoter. In some embodiments, a promoter to drive expression of the guide RNA includes a sequence encoding a hybrid or a recombinant promoter. In some embodiments, a promoter to drive expression of the guide RNA is a promoter capable of expressing the guide RNA in a mammalian cell or a human cell. In some embodiments, a promoter to drive expression of the guide RNA is a promoter capable of expressing the guide RNA and restricting the guide RNA to the nucleus of the cell. In some embodiments, a promoter to drive expression of the guide is a human RNA polymerase promoter or a sequence isolated or derived from a human RNA polymerase promoter. In some embodiments, a promoter to drive expression of the guide RNA is a U6 promoter or a sequence isolated or derived from a U6 promoter. In some embodiments, a promoter to drive expression of the guide RNA is a human tRNA promoter or a sequence isolated or derived from a human tRNA promoter. In some embodiments, a promoter to drive expression of the guide RNA is a human valine tRNA promoter or a sequence isolated or derived from a human valine tRNA promoter.

[0104] In some embodiments of the compositions of the disclosure, a promoter to drive expression of the capped-guide RNA further includes a regulatory element. In some embodiments, a vector that includes promoter to drive expression of the guide RNA further includes a regulatory element. In some embodiments, a regulatory element enhances expression of the guide RNA. Exemplary regulatory elements include, but are not limited to, an enhancer element, an intron, an exon, or a combination thereof.

[0105] In some embodiments, the nucleic acid sequences encoding the Cas polypeptides are linked to one or more localization signals. Localization signals are amino acid sequences on a protein that tags the protein for transportation to a particular location in a cell. An exemplary localization signal is a nuclear localization signal (NLS), which is an amino acid sequence that tags a protein for import into the cell nucleus by nuclear transport. In one embodiment, one or more localization signals is/are operably linked to the sequence encoding a Cas polypeptide. In some embodiments, the localization signal is a nuclear localization signal (NLS). An exemplary NLS is SV40 large T antigen NLS (PKKKRRV (SEQ ID NO: 477)) and nucleoplasmin NLS (KRPAATKKAGQAKKKK (SEQ ID NO: 478)). Other NLSs are known in the art; see, e.g., Konermann et al., Cell 173:665-676, 2018; Cokol et al., EMBO Rep. 1(5):411-415 (2000); Freitas and Cunha, Curr Genomics 10(8): 550-557 (2009), incorporated herein by reference in their entirety. Without limitation, additional NLSs are those that have K(K/R)X(K/R) as a putative consensus sequence (e.g., PAAKRVKLD (SEQ ID NO: 479)). Other additional NLSs include KRSWSMAF (SEQ ID NO: 480) and KRKYF (SEQ ID NO: 481). In some embodiments, vectors comprising the nucleic acids that encode the Cas polypeptide further encode a capped-sgRNA (e.g., any of the capped-sgRNAs described herein). In some embodiments, the localization signal is a nuclear export signal (NES). Incorporating an NES is particularly suited for altering molecular machinery in the cytoplasm. In one embodiment, an NES is the HIV-REV NES or the PKI NES.

[0106] In other embodiments, the nucleic acids encoding the capped-sgRNA and/or the Cas polypeptide can be further operably linked to a sequence that encodes one or more reporter genes, or effector genes such as, without limitation, endonucleases that have nuclease activity. In one embodiment, a nucleic acid sequence encodes a capped-sgRNA disclosed herein and a fusion protein that includes a dCas polypeptide and an endonuclease. Any suitable reporter genes are contemplated, including but not limited to, fluorescent reporters. In addition, any suitable endonucleases are contemplated for fusing with a Cas polypeptide, in particular a dCas polypeptide.

### V. Vectors

[0107] Vectors contemplated for the present disclosure can include those that are suitable for expression in a selected host, whether prokaryotic or eukaryotic, for example, phage, plasmid, and viral vectors. Viral vectors may be either replication competent or replication defective retroviral vectors. Viral propagation generally will occur only in complementing host cells comprising replication defective vectors, for example, when using replication defective retroviral vectors in methods provided herein viral replication will not occur. Vectors may comprise kozak sequences (Lodish et al., Molecular Cell Biology, 4th ed., 1999) and may also contain the ATG start codon. Promoters that function in a eukaryotic host are from, without limitation, SV40, LTR, CMV, EF-1 a, white cloud mountain minnow β-actin.

[0108] In some embodiments of the compositions of the disclosure, a vector of the disclosure includes one or more of a sequence encoding at least one capped-guide RNA of the disclosure, one or more promoters to drive expression of the one or more guide RNAs and a sequence encoding a regulatory element. In some embodiments of the compositions of the disclosure, the vector further includes a sequence encoding a Cas polypeptide, a dCas polypeptide or a dCas-fusion protein.

[0109] Copy number and positional effects are considered in designing transiently and stably expressed vectors. Copy number can be increased by, for example, dihydrofolate reductase amplification. Positional effects can be optimized by, for example, Chinese hamster elongation factor-1 vector pDEF38 (CHEF1), ubiquitous chromatin opening elements (UCOE), scaffold/matrix-attached region of human (S/MAR), and artificial chromosome expression (ACE) vectors, as well as by using site-specific integration methods known in the art. The expression constructs containing the vector can further contain sites for transcription initiation, termination, and, in the transcribed region, a ribosome binding site for translation. The coding portion of the transcripts expressed by the constructs can include a translation initiating codon at the beginning and a termination codon (UAA, UGA, or UAG) appropriately positioned at the end of the polypeptide to be translated.

[0110] Considering the above-mentioned factors, exemplary vectors suitable for expressing Cas polypeptides and/or sgRNAs in bacteria include PiggyBac transposon vectors, pTT vectors (e.g., from Biotechnology Research Institute (Montreal, Canada)), pQE70, pQE60, and pQE-9 (e.g. those available from Qiagen (Mississauga, Ontario, Canada)); vectors derived from pcDNA3, available from Invitrogen (Carlsbad, Calif.); pBS vectors, Phagescript vectors, Bluescript vectors, pNH8A, pNH6a, pNH18A, pNH46A, available from Stratagene (La Jolla, Calif.); and ptrc99a, pKK223-3, pKK233-3, pDR540, pRIT5 available from Pharmacia (Peapack, N.J.). Among suitable eukaryotic vectors are pWLNEO, pSV2CAT, pOG44, pXT1, and pSG available from Stratagene (La Jolla, Calif.); and pSVK3, pBPV, pMSG and pSVL, available from Pharmacia (Peapack, N.J.).

[0111] A pTT vector backbone can be used for expressing the Cas polypeptide and/or sgRNA (Durocher et al., Nucl. Acids Res. 30:E9 (2002)). Briefly, the backbone of a pTT vector may be prepared by obtaining pIRESpuro/EGFP (pEGFP) and pSEAP basic vector(s), for example from Clontech (Palo Alto, Calif.), and pcDNA3.1, pCDNA3.1/Myc-(His)6 and pCEP4 vectors can be obtained from, for example, Invitrogen (Carlsbad, Calif.). As used herein, the pTT5 backbone vector can generate a pTT5-Gateway vector and be used to transiently express proteins in mammalian cells. The pTT5 vector can be derivatized to pTT5-A, pTT5-B, pTT5-D, pTT5-E, pTT5-H, and pTT5-I, for example. As used herein, the pTT2 vector can generate constructs for stable expression in mammalian cell lines.

[0112] A pTT vector can be prepared by deleting the hygromycin (Bsml and Sail excision followed by fill-in and ligation) and EBNA1 (Clal and Nsil excision followed by fill-in and ligation) expression cassettes. The ColEI origin (Fspl-Sall fragment, including the 3′ end of the β-lactamase open reading frame (ORF) can be replaced with a Fspl-Sall fragment from pcDNA3.1 containing the pMBI origin (and the same 3′ end of β-lactamase ORF). A Myc-(His)6 C-terminal fusion tag can be added to SEAP (Hindlll-Hpal fragment from pSEAP-basic) following in-frame ligation in pcDNA3.1/Myc-His digested with Hindlll and EcoPvV. Plasmids can subsequently be amplified in E. coli (DH5a) grown in LB medium and purified using MAXI prep columns (Qiagen, Mississauga, Ontario, Canada). To quantify, plasmids can be subsequently diluted in, for example, 50 mM Tris-HCl pH 7.4 and absorbencies can be measured at 260 nm and 280 nm. Plasmid preparations with A260/A280 ratios between about 1.75 and about 2.00 are suitable for producing the Fc-fusion constructs.

[0113] The expression vector pTT5 allows for extrachromosomal replication of the cDNA driven by a cytomegalovirus (CMV) promoter. The plasmid vector pCDNA-pDEST40 is a Gateway-adapted vector which can utilize a CMV promoter for high-level expression. SuperGlo GFP variant (sgGFP) can be obtained from Q-Biogene (Carlsbad, Calif.). Preparing a pCEP5 vector can be accomplished by removing the CMV promoter and polyadenylation signal of pCEP4 by sequential digestion and self-ligation using Sail and Xbal enzymes resulting in plasmid pCEP4A. A Gblll fragment from pAdCMV5 (Massie et al., J. Virol. 72:2289-2296 (1998)), encoding the CMV5-poly(A) expression cassette ligated in Bglll-linearized pCEP4A, resulting in the pCEP5 vector.

[0114] Additional vectors include optimized for use in CHO-S or CHO-S-derived cells, such as pDEF38 (CHEF 1) and similar vectors (Running Deer et al., Biotechnol. Prog. 20:880-889 (2004)). The CHEF vectors contain DNA elements that lead to high and sustained expression in CHO cells and derivatives thereof. They may include, but are not limited to, elements that prevent the transcriptional silencing of transgenes.

[0115] Vectors may include a selectable marker for propagation in a host. A selectable marker can allow the selection of transformed cells based on their ability to thrive in the presence or absence of a chemical or other agent that inhibits an essential cell function. Selectable markers confer a phenotype on a cell expressing the marker, so that the cell can be identified under appropriate conditions. Suitable markers include genes coding for proteins which confer drug resistance or sensitivity thereto, impart color to, or change the antigenic characteristics of those cells transfected with a molecule encoding the selectable marker, when the cells are grown in an appropriate selective medium.

[0116] Suitable selectable markers include dihydro folate reductase or G41 8 for neomycin resistance in eukaryotic cell culture; and tetracycline, kanamycin, or ampicillin resistance genes for culturing in E. coli and other bacteria. Suitable selectable markers also include cytotoxic markers and drug resistance markers, whereby cells are selected by their ability to grow on media containing one or more of the cytotoxins or drugs; auxotrophic markers, by which cells are selected for their ability to grow on defined media with or without particular nutrients or supplements, such as thymidine and hypoxanthine; metabolic markers for which cells are selected, for example, for ability to grow on defined media containing a defined substance, for example, an appropriate sugar as the sole carbon source; and markers which confer the ability of cells to form colored colonies on chromogenic substrates or cause cells to fluoresce.

[0117] Retroviral vectors are contemplated herein. One such vector, the ROSA geo retroviral vector, which maps to mouse chromosome six, was constructed with the reporter gene in reverse orientation with respect to retroviral transcription, downstream of a splice acceptor sequence (U.S. Pat. No. 6,461,864; Zambrowicz et al., Proc. Natl. Acad. Sci. 94:3789-3794 (1997)). Infecting embryonic stem (ES) cells with ROSA geo retroviral vector resulted in the ROSA geo26 (ROSA26) mouse strain by random retroviral gene trapping in the ES cells.

[0118] Adeno-associated viral vectors (AAV vectors) are contemplated herein. The term“adeno-associated virus” or “AAV” as used herein can refer to a member of the class of viruses associated with this name and belonging to the genus dependoparvovirus, family Parvoviridae. Multiple serotypes of this virus are known to be suitable for gene delivery; all known serotypes can infect cells from various tissue types. At least 11 or 12, sequentially numbered, are disclosed in the prior art. Non-limiting exemplary serotypes useful in the methods disclosed herein include any of the 11 or 12 serotypes, e.g., AAV2, AAV5, and AAV8, or variant serotypes, e.g. AAV-DJ. The AAV structural particle is composed of 60 protein molecules made up of VP1, VP2, and VP3. Each particle contains approximately 5 VP1 proteins, 5 VP2 proteins and 50 VP3 proteins ordered into an icosahedral structure.

[0119] AAV is a naturally occurring defective virus that requires another virus, such as an adenovirus or a herpes virus, as a helper virus for efficient replication and a productive life cycle. (For a review, see Muzyczka et al., Curr. Topics in Micro and Immunol. 158:97-129 (1992)). AAV vectors efficiently transduce various cell types and can produce long-term expression of transgenes in vivo. AAV vectors have been extensively used for gene augmentation or replacement and have shown therapeutic efficacy in a range of animal models as well as in the clinic; see, e.g., Mingozzi and High, Nature Reviews Genetics 12, 341-355 (2011); Deyle and Russell, Curr Opin Mol Ther. 2009 August; 11(4): 442-447; Asokan et al., Mol Ther. 2012 April; 20(4): 699-708. AAV vectors containing as little as 300 base pairs of AAV can be packaged and can produce recombinant protein expression. For example, AAV2, AAV5, AAV2/5, AAV2/8 and AAV2/7 vectors have been used to introduce DNA into photoreceptor cells (see, e.g., Pang et al., Vision Research 2008, 48(3):377-385; Khani et al., Invest Ophthalmol Vis Sci. 2007 September; 48(9):3954-61; Allocca et al., J. Virol. 2007 81(20):11372-11380). In some embodiments, the AAV vector can include (or include a sequence encoding) an AAV capsid polypeptide described in PCT/US2014/060163; for example, a virus particle comprising an AAV capsid polypeptide having an amino acid sequence selected from the group consisting of SEQ ID NOs: 1, 3, 5, 7, 9, 11, 13, 15, and 17 of PCT/US2014/060163, and a Cas sequence and capped-guide RNA sequence as described herein. In some embodiments, the AAV capsid polypeptide is an Anc80 polypeptide, e.g., Anc80L27; Anc80L59; Anc80L60; Anc80L62; Anc80L65; Anc80L33; Anc80L36; or Anc80L44. In some embodiments, the AAV incorporates inverted terminal repeats (ITRs) derived from the AAV2 serotype. Exemplary left and right ITRs are presented in Table 6 of WO 2018/026976 and are listed below:

AAV2 Left ITR
(SEQ ID NO: 482)
TTGGCCACTCCCTCTCTGCGCGCTCGCTCGCTCACTGAGGCCGGGCGACCA
AAGGTCGCCCGACGCCCGGGCTTTGCCCGGGCGGCCTCAGTGAGCGAGCGA
GCGCGCAGAGAGGGAGTGGCCAACTCCATCACTAGGGGTTCCT
AAV2 Right ITR
(SEQ ID NO: 483)
AGGAACCCCTAGTGATGGAGTTGGCCACTCCCTCTCTGCGCGCTCGCTCGC
TCACTGAGGCCGCCCGGGCAAAGCCCGGGCGTCGGGCGACCTTTGGTCGCC
CGGCCTCAGTGAGCGAGCGAGCGCGCAGAGAGGGAGTGGCCAA

[0120] It should be noted, however, that numerous modified versions of the AAV2 ITRs are used in the field, and the ITR sequences shown below are exemplary and are not intended to be limiting. Modifications of these sequences are known in the art, or will be evident to skilled artisans, and are thus included in the scope of this disclosure. Expression of the Cas polypeptide and/or sgRNA in the AAV vector can be driven by a promoter described herein or known in the art. In some embodiments, AAV vectors capable of delivering ˜4.5 kb are used for packaging of the nucleic acids encoding capped-sgRNAs or Cas polypeptides. In some embodiments, AAVs capable of packaging larger transgenes such as about 4.6 kb, 4.7 kb, 4.8 kb, 4.9 kb, 5.0 kb, 5.1 kb, 5.2 kb, 5.3 kb, 5.4 kb, 5.5 kb, 5.6 kb, 5.7 kb, 5.8 kb, 5.9 kb, 6.0 kb, 6.1 kb, 6.2 kb, 6.3 kb, 6.4 kb, 6.5 kb, 6.6 kb, 6.7 kb, 6.8 kb, 6.9 kb, 7.0 kb, 7.5 kb, 8.0 kb, 9.0 kb, 10.0 kb, 11.0 kb, 12.0 kb, 13.0 kb, 14.0 kb, 15.0 kb, or larger are used.

[0121] A DNA insert comprising nucleic acids (optionally contained in a vector or vectors) encoding Cas9 polypeptides or sgRNAs can be operatively linked to an appropriate promoter, such as the phage lambda PL promoter; the E. coli lac, trp, phoA, and tac promoters; the SV40 early and late promoters; and promoters of retroviral LTRs. Suitable vectors and promoters also include the pCMV vector with an enhancer, pcDNA3.1; the pCMV vector with an enhancer and an intron, pCIneo; the pCMV vector with an enhancer, an intron, and a tripartate leader, pTT2, and CHEF1. The promoter sequences include at least the minimum number of bases or elements necessary to initiate transcription of a gene of interest at levels detectable above background. Within the promoter sequence may be a transcription initiation site, as well as protein binding domains (consensus sequences) responsible for the binding of RNA polymerase. In alternative embodiments, eukaryotic promoters will often, but not always, contain “TATA” boxes and “CAT” boxes.

[0122] The expression constructs can further contain sites for transcription initiation, termination, and, in the transcribed region, a ribosome binding site for translation. The coding portion of the transcripts expressed by the constructs can include a translation initiating codon at the beginning and a termination codon (UAA, UGA, or UAG) appropriately positioned at the end of the polypeptide to be translated.

[0123] In some embodiments of the compositions and methods of the disclosure, the vector is or comprises an “RNA targeting system” comprising (a) nucleic acid sequence encoding an Cas polypeptide or dCas polypeptide or dCas polypeptide fusion protein; and (b) a capped-single guide RNA (capped-sgRNA) sequence comprising: an RNA sequence (or spacer sequence) that hybridizes to or binds to a target RNA sequence and an RNA sequence (direct repeat or scaffold sequence) capable of binding to or associating with the Cas polypeptide and wherein the RNA targeting system recognizes the target RNA and enhances translation of the target RNA. In some embodiments, the nucleic acid sequence or vector is a single vector.

### VI. Cells

[0124] Some embodiments disclosed herein provide cells comprising the nucleic acid or nucleic acids (e.g., vector or vectors) that encode Cas9 polypeptides or capped-sgRNAs. In some embodiments, the cells transfected may be a prokaryotic cell, a eukaryotic cell, a yeast cell, an insect cell, an animal cell, a mammalian cell, a human cell, etc. The proteins expressed in mammalian cells have been glycosylated properly. Examples of useful mammalian host cell lines are HEK293, CHO, sp2/0, NSO, COS, BHK, and PerC6.

[0125] In some embodiments, the target mRNA is in a cell. In some embodiments, the cell is a eukaryotic cell. In some embodiments, the cell is a prokaryotic cell. In some embodiments, the cell is a mammalian cell. In some embodiments, the cell is a bovine, murine, feline, equine, porcine, canine, simian, or human cell. In some embodiments, the cell is a plant cell. In some embodiments, the cell is in a subject or patient. In some embodiments, the cell is in vivo, in vitro, ex vivo, or in situ. In some embodiments, the composition comprises a vector comprising composition comprising the capped-guide RNA of the disclosure and/or a Cas polypeptide or dCas polypeptide. In some embodiments, the vector is a viral vector for transducing a cell. In some embodiments, the viral vector is an AAV vector.

[0126] Transfection of animal cells typically involves opening transient pores or “holes” in the cell membrane, to allow the uptake of material. There are various methods of introducing foreign DNA into a eukaryotic cell. Transfection can be carried out using calcium phosphate, by electroporation, or by mixing a cationic lipid with the material to produce liposomes, which fuse with the cell membrane and deposit their cargo inside. Many materials have been used as carriers for transfection, which can be divided into three kinds: (cationic) polymers, liposomes, and nanoparticles.

### VII. Methods of Modulating Protein Translation

[0127] Some embodiments disclosed herein provide compositions for and methods of enhancing protein translation in a cell, comprising introducing capped-sgRNAs (e.g., any of the capped-sgRNAs described herein) and Cas polypeptides (e.g., any of the Cas polypeptides described herein) into the cell. The methods of enhancing protein translation can include introducing or administering a nucleic acid or nucleic acids (e.g., vector or vectors) encoding the capped-sgRNA and the Cas polypeptides into a cell. In some embodiments, provided herein are methods of regulating translation of an mRNA in a cell that include contacting the cell with a nucleic acid comprising (a) a sequence encoding a Cas polypeptide; and (b) a sequence encoding a capped-sgRNA comprising (i) an m7G cap; (ii) a spacer capable of specifically hybridizing with a target sequence in an RNA molecule; and (iii) a direct repeat capable of binding to the Cas polypeptide.

[0128] Methods of measuring levels of protein translation are known in the art. Exemplary methods include, without limitation, western blot, mass spectrometry, antibody staining, and mean fluorescence intensity flow cytometry. In instances where a reporter construct is linked to the target mRNA, protein translation can also be measured based on the levels of the reporter molecule.

[0129] In some embodiments, enhancing translation or increasing or upregulating gene expression refers to an increase in the amount of peptide translated from the target mRNA as compared to a control. In some embodiments, the control includes a level of peptide translated from the target mRNA in the absence of the capped-sgRNA compositions and methods. In some embodiments, the control includes the level of the peptide translated from the target mRNA prior to addition of the compositions disclosed herein. In some embodiments, translation is increased about 1.1 fold, about 1.2 fold, about 1.3 fold, about 1.4 fold, about 1.5 fold, about 1.6 fold, about 1.7 fold, about 1.8 fold, about 1.9 fold, about 2 fold, about 2.5 fold, about 3 fold, about 4 fold, about 5 fold, about 6 fold, about 7 fold, about 8 fold, about 9 fold, about 10 fold, about 20 fold, about 50 fold, about 100 fold, about 1000 fold, or about 10,000 fold relative to the control. The amount of peptide translated can be determined by any method known in the art.

### Gene Therapy/Therapeutic Targets

[0130] In certain embodiments, methods of modulating protein translation are useful for treating patients afflicted with a disease or disorder. In one embodiment, methods of using the capped-sgRNA compositions disclosed herein are haploinsufficiencies. Exemplary haploinsufficiency diseases or disorders include, without limitation, Autosomal dominant Retinitis Pigmentosa (RP11) caused by mutations in PRPF31, Autosomal dominant Retinitis Pigmentosa (RP31) caused by mutations in TOPORS, Frontotemporal dementia caused by mutations in GRN, DeVivo Syndrome (Glut1 deficiency) caused by mutations in SLC2A1, Dravet syndrome caused by mutations in SCN1A, 1q21.1 Deletion Syndrome, 5q-Syndrome in Myelodysplastic Syndrome (MDS), 22q11.2 Deletion Syndrome, CHARGE Syndrome, Cleidocrainial Dysostosis, Ehlers-Danlos Syndrome, Frontotemporal Dementia caused by mutations in Progranulin, Haploinsufficiency of A20, Holoprosencephaly (caused by haploinsufficiency in the Sonic Hedgehog gene), Holt-Oram Syndrome, Marfan Syndrome, Dyskeratosis Congenita, and Phelan-McDermid Syndrome.

[0131] In another embodiment, methods of using the capped-sgRNA compositions disclosed herein for treating haploinsufficiency diseases or disorders, such as, without limitation, those listed in the preceding paragraph, involving mutations which lead to introduction of a premature termination codon (PTC) resulting in degradation from mutant allele or loss of function of the protein (or less protein to be produced) are contemplated herein.

[0132] In another embodiment, methods of translation enhancement using the capped-sgRNA compositions disclosed herein are useful for treating cancer. In one embodiment, the methods can be used for upregulating protein expression of tumor suppressor genes (TSG) in tissue predisposed to cancer due to hereditary (or acquired) mutations of TSG. In another embodiment, the methods can be used for upregulating protein expression from genes that would prevent cancer from metastasizing (ie angiogenesis genes). In another embodiment, the methods can be used for upregulating protein expression from genes that would result in the cancer being more susceptible to follow-up treatments. In another embodiment, the methods can be used for translational enhancement to prevent cancer evasion of the immune system.

[0133] As used herein, the “administration” of the compositions disclosed herein (e.g., a fusion RNA, viral particle, vector, polynucleotide, cell, population of cells, or pharmaceutical composition or formulation) to a subject includes any route of introducing or delivering to a subject the agent to perform its intended function. Administration can be carried out by any suitable route, including orally, intranasally, intraocularly, ophthalmically, parenterally (intravenously, intramuscularly, intraperitoneally, or subcutaneously), or topically. Administration includes self-administration and the administration by another.

[0134] In some aspects, the disclosure provides a method of treating a disease or disorder comprising administering to a subject a therapeutically effective amount of a capped-sgRNA composition(s) of the disclosure. Also provided herein are methods for treating a disease or condition in a subject in need thereof, the methods comprising, consisting of, or consisting essentially of administering a nucleic acid sequence comprising/encoding (a) a capped-sgRNA disclosed herein; and (b) a dCas polypeptide, a vector comprising the nucleic acid sequence, or a viral particle comprising the vector to the subject, thereby enhancing translation of a target mRNA in the subject or patient. In some embodiments, the target mRNA is involved in the etiology of a disease or condition in the subject.

[0135] In some embodiments of the methods described herein, the subject or patient is an animal. In some embodiments, the subject is a mammal. In some embodiments, the mammal is a bovine, equine, porcine, canine, feline, simian, murine, or human. In some embodiments, the subject is a human.

[0136] In some embodiments of the compositions and methods of the disclosure, a disease or disorder of the disclosure includes, but is not limited to, a genetic disease or disorder. In some embodiments, the genetic disease or disorder is a single-gene disease or disorder. In some embodiments, the single-gene disease or disorder is an autosomal dominant disease or disorder, an autosomal recessive disease or disorder, an X-chromosome linked (X-linked) disease or disorder, an X-linked dominant disease or disorder, an X-linked recessive disease or disorder, a Y-linked disease or disorder or a mitochondrial disease or disorder. In some embodiments, the genetic disease or disorder is a multiple-gene disease or disorder. In some embodiments, the genetic disease or disorder is a multiple-gene disease or disorder. In some embodiments, the single-gene disease or disorder is an autosomal dominant disease or disorder including, but not limited to, Huntington's disease, neurofibromatosis type 1, neurofibromatosis type 2, Marfan syndrome, hereditary nonpolyposis colorectal cancer, hereditary multiple exostoses, Von Willebrand disease, and acute intermittent porphyria. In some embodiments, the single-gene disease or disorder is an autosomal recessive disease or disorder including, but not limited to, Albinism, Medium-chain acyl-CoA dehydrogenase deficiency, cystic fibrosis, sickle-cell disease, Tay-Sachs disease, Niemann-Pick disease, spinal muscular atrophy, and Roberts syndrome. In some embodiments, the single-gene disease or disorder is X-linked disease or disorder including, but not limited to, muscular dystrophy, Duchenne muscular dystrophy, Hemophilia, Adrenoleukodystrophy (ALD), Rett syndrome, and Hemophilia A. In some embodiments, the single-gene disease or disorder is a mitochondrial disorder including, but not limited to, Leber's hereditary optic neuropathy.

[0137] In some embodiments of the compositions and methods of the disclosure, a disease or disorder of the disclosure includes, but is not limited to, an immune disease or disorder. In some embodiments, the immune disease or disorder is an immunodeficiency disease or disorder including, but not limited to, B-cell deficiency, T-cell deficiency, neutropenia, asplenia, complement deficiency, acquired immunodeficiency syndrome (AIDS) and immunodeficiency due to medical intervention (immunosuppression as an intended or adverse effect of a medical therapy). In some embodiments, the immune disease or disorder is an autoimmune disease or disorder including, but not limited to, Achalasia, Addison's disease, Adult Still's disease, Agammaglobulinemia, Alopecia areata, Amyloidosis, Anti-GBM/Anti-TBM nephritis, Antiphospholipid syndrome, Autoimmune angioedema, Autoimmune dysautonomia, Autoimmune encephalomyelitis, Autoimmune hepatitis, Autoimmune inner ear disease (AIED), Autoimmune myocarditis, Autoimmune oophoritis, Autoimmune orchitis, Autoimmune pancreatitis, Autoimmune retinopathy, Autoimmune urticaria, Axonal & neuronal neuropathy (AMAN), Balo disease, Behcet's disease, Benign mucosal pemphigoid, Bullous pemphigoid, Castleman disease (CD), Celiac disease, Chagas disease, Chronic inflammatory demyelinating polyneuropathy (CIDP), Chronic recurrent multifocal osteomyelitis (CRMO), Churg-Strauss Syndrome (CSS) or Eosinophilic Granulomatosis (EGPA), Cicatricial pemphigoid, Cogan's syndrome, Cold agglutinin disease, Congenital heart block, Coxsackie myocarditis, CREST syndrome, Crohn's disease, Dermatitis herpetiformis, Dermatomyositis, Devic's disease (neuromyelitis optica), Discoid lupus, Dressler's syndrome, Endometriosis, Eosinophilic esophagitis (EoE), Eosinophilic fasciitis, Erythema nodosum, Essential mixed cryoglobulinemia, Evans syndrome, Fibromyalgia, Fibrosing alveolitis, Giant cell arteritis (temporal arteritis), Giant cell myocarditis, Glomerulonephritis, Goodpasture's syndrome, Granulomatosis with Polyangiitis, Graves' disease, Guillain-Barre syndrome, Hashimoto's thyroiditis, Hemolytic anemia, Henoch-Schonlein purpura (HSP), Herpes gestationis or pemphigoid gestationis (PG), Hidradenitis Suppurativa (HS) (Acne Inversa), Hypogammalglobulinemia, IgA Nephropathy, IgG4-related sclerosing disease, Immune thrombocytopenic purpura (ITP), Inclusion body myositis (IBM), Interstitial cystitis (IC), Juvenile arthritis, Juvenile diabetes (Type 1 diabetes), Juvenile myositis (JM), Kawasaki disease, Lambert-Eaton syndrome, Leukocytoclastic vasculitis, Lichen planus, Lichen sclerosus, Ligneous conjunctivitis, Linear IgA disease (LAD), Lupus, Lyme disease chronic, Meniere's disease, Microscopic polyangiitis (MPA), Mixed connective tissue disease (MCTD), Mooren's ulcer, Mucha-Habermann disease, Multifocal Motor Neuropathy (MMN) or MMNCB, Multiple sclerosis, Myasthenia gravis, Myositis, Narcolepsy, Neonatal Lupus, Neuromyelitis optica, Neutropenia, Ocular cicatricial pemphigoid, Optic neuritis, Palindromic rheumatism (PR), PANDAS, Paraneoplastic cerebellar degeneration (PCD), Paroxysmal nocturnal hemoglobinuria (PNJJ), Parry Romberg syndrome, Pars planitis (peripheral uveitis), Parsonnage-Tumer syndrome, Pemphigus, Peripheral neuropathy, Perivenous encephalomyelitis, Pernicious anemia (PA), POEMS syndrome, Polyarteritis nodosa, Polyglandular syndromes type I, II, III, Polymyalgia rheumatica, Polymyositis, Postmyocardial infarction syndrome, Postpericardiotomy syndrome, Primary biliary cirrhosis, Primary sclerosing cholangitis, Progesterone dermatitis, Psoriasis, Psoriatic arthritis, Pure red cell aplasia (PRCA), Pyoderma gangrenosum, Raynaud's phenomenon, Reactive Arthritis, Reflex sympathetic dystrophy, Relapsing polychondritis, Restless legs syndrome (RLS), Retroperitoneal fibrosis, Rheumatic fever, Rheumatoid arthritis, Sarcoidosis, Schmidt syndrome, Scleritis, Scleroderma, Sjogren's syndrome, Sperm & testicular autoimmunity, Stiff person syndrome (SPS), Subacute bacterial endocarditis (SBE), Susac's syndrome, Sympathetic ophthalmia (SO), Takayasu's arteritis, Temporal arteritis/Giant cell arteritis, Thrombocytopenic purpura (TTP), Tolosa-Hunt syndrome (THS), Transverse myelitis, Type 1 diabetes, Ulcerative colitis (UC), Undifferentiated connective tissue disease (UCTD), Uveitis, Vasculitis, Vitiligo, Vogt-Koyanagi-Harada Disease, or Wegener's granulomatosis.

[0138] In some embodiments of the compositions and methods of the disclosure, a disease or disorder of the disclosure includes, but is not limited to, an inflammatory disease or disorder.

[0139] In some embodiments of the compositions and methods of the disclosure, a disease or disorder of the disclosure includes, but is not limited to, a metabolic disease or disorder.

[0140] In some embodiments of the compositions and methods of the disclosure, a disease or disorder of the disclosure includes, but is not limited to, a degenerative or a progressive disease or disorder. In some embodiments, the degenerative or a progressive disease or disorder includes, but is not limited to, amyotrophic lateral sclerosis (ALS), Huntington's disease, Alzheimer's disease, and aging.

[0141] In some embodiments of the compositions and methods of the disclosure, a disease or disorder of the disclosure includes, but is not limited to, an infectious disease or disorder.

[0142] In some embodiments of the compositions and methods of the disclosure, a disease or disorder of the disclosure includes, but is not limited to, a pediatric or a developmental disease or disorder.

[0143] In some embodiments of the compositions and methods of the disclosure, a disease or disorder of the disclosure includes, but is not limited to, a cardiovascular disease or disorder.

[0144] In some embodiments of the compositions and methods of the disclosure, a disease or disorder of the disclosure includes, but is not limited to, a proliferative disease or disorder. In some embodiments, the proliferative disease or disorder is a cancer. In some embodiments, the cancer includes, but is not limited to, Acute Lymphoblastic Leukemia (ALL), Acute Myeloid Leukemia (AML), Adrenocortical Carcinoma, AIDS-Related Cancers, Kaposi Sarcoma (Soft Tissue Sarcoma), AIDS-Related Lymphoma (Lymphoma), Primary CNS Lymphoma (Lymphoma), Anal Cancer, Appendix Cancer, Gastrointestinal Carcinoid Tumors, Astrocytomas, Atypical Teratoid/Rhabdoid Tumor, Central Nervous System (Brain Cancer), Basal Cell Carcinoma, Bile Duct Cancer, Bladder Cancer, Bone Cancer, Ewing Sarcoma, Osteosarcoma, Malignant Fibrous Histiocytoma, Brain Tumors, Breast Cancer, Burkitt Lymphoma, Carcinoid Tumor, Carcinoma, Cardiac (Heart) Tumors, Embryonal Tumors, Germ Cell Tumor, Primary CNS Lymphoma, Cervical Cancer, Cholangiocarcinoma, Chordoma, Chronic Lymphocytic Leukemia (CLL), Chronic Myelogenous Leukemia (CML), Chronic Myeloproliferative Neoplasms, Colorectal Cancer, Craniopharyngioma, Cutaneous T-Cell Lymphoma, Ductal Carcinoma In Situ, Embryonal Tumors, Endometrial Cancer (UterineCancer), Ependymoma, Esophageal Cancer, Esthesioneuroblastoma (Head and Neck Cancer), Ewing Sarcoma (Bone Cancer), Extracranial Germ Cell Tumor, Extragonadal Germ Cell Tumor, Eye Cancer, Childhood Intraocular Melanoma, Intraocular Melanoma, Retinoblastoma, Fallopian Tube Cancer, Fibrous Histiocytoma of Bone, Malignant, and Osteosarcoma, Gallbladder Cancer, Gastric (Stomach) Cancer, Gastrointestinal Carcinoid Tumor, Gastrointestinal Stromal Tumors (GIST) (Soft Tissue Sarcoma), Childhood Gastrointestinal Stromal Tumors, Germ Cell Tumors, Childhood Extracranial Germ Cell Tumors, Extragonadal Germ Cell Tumors, Ovarian Germ Cell Tumors, Testicular Cancer, Gestational Trophoblastic Disease, Hairy Cell Leukemia, Head and Neck Cancer, Heart Tumors, Hepatocellular (Liver) Cancer, Histiocytosis, Hodgkin Lymphoma, Hypopharyngeal Cancer (Head and Neck Cancer), Intraocular Melanoma, Islet Cell Tumors, Pancreatic Neuroendocrine Tumors, Kaposi Sarcoma (Soft Tissue Sarcoma), Kidney (Renal Cell) Cancer, Langerhans Cell Histiocytosis, Laryngeal Cancer (Head and Neck Cancer), Leukemia, Lip and Oral Cavity Cancer (Head and Neck Cancer), Liver Cancer, Lung Cancer (Non-Small Cell and Small Cell), Childhood Lung Cancer, Lymphoma, Male Breast Cancer, Malignant Fibrous Histiocytoma of Bone and Osteosarcoma, Melanoma, Merkel Cell Carcinoma (Skin Cancer), Mesothelioma, Metastatic Squamous Neck Cancer with Occult Primary (Head and Neck Cancer), Midline Tract Carcinoma With NUT Gene Changes, Mouth Cancer (Head and Neck Cancer), Multiple Endocrine Neoplasia Syndromes, Multiple Myeloma/Plasma Cell Neoplasms, Mycosis Fungoides (Lymphoma), Myelodysplastic Syndromes, Myelodysplastic/Myeloproliferative Neoplasms, Nasal Cavity and Paranasal Sinus Cancer (Head and Neck Cancer), Nasopharyngeal Cancer (Head and Neck Cancer), Neuroblastoma, Non-Hodgkin Lymphoma, Non-Small Cell Lung Cancer, Oral Cancer, Lip and Oral Cavity Cancer and Oropharyngeal Cancer, Osteosarcoma and Malignant Fibrous Histiocytoma of Bone, Ovarian Cancer, Pancreatic Cancer, Pancreatic Neuroendocrine Tumors (Islet Cell Tumors), Papillomatosis, Paraganglioma, Parathyroid Cancer, Penile Cancer, Pharyngeal Cancer (Head and Neck Cancer), Pheochromocytoma, Plasma Cell Neoplasm/Multiple Myeloma, Pleuropulmonary Blastoma, Pregnancy and Breast Cancer, Primary Central Nervous System (CNS) Lymphoma, Primary Peritoneal Cancer, Prostate Cancer, Rectal Cancer, Recurrent Cancer, Renal Cell (Kidney) Cancer, Retinoblastoma, Rhabdomyosarcoma, Childhood (Soft Tissue Sarcoma), Salivary Gland Cancer (Head and Neck Cancer), Sarcoma, Childhood Rhabdomyosarcoma (Soft Tissue Sarcoma), Childhood Vascular Tumors (Soft Tissue Sarcoma), Ewing Sarcoma (Bone Cancer), Kaposi Sarcoma (Soft Tissue Sarcoma), Osteosarcoma (Bone Cancer), Uterine Sarcoma, Sezary Syndrome, Lymphoma, Skin Cancer, Small Cell Lung Cancer, Small Intestine Cancer, Soft Tissue Sarcoma, Squamous Cell Carcinoma of the Skin, Squamous Neck Cancer, Stomach (Gastric) Cancer, T-Cell Lymphoma, Testicular Cancer, Throat Cancer (Head and Neck Cancer), Nasopharyngeal Cancer, Oropharyngeal Cancer, Hypopharyngeal Cancer, Thymoma and Thymic Carcinoma, Thyroid Cancer, Transitional Cell Cancer of the Renal Pelvis and Ureter, Renal Cell Cancer, Urethral Cancer, Uterine Sarcoma, Vaginal Cancer, Vascular Tumors (Soft Tissue Sarcoma), Vulvar Cancer, Wilms Tumor and Other Childhood Kidney Tumors.

[0145] In some embodiments of the methods of the disclosure, a subject of the disclosure has been diagnosed with the disease or disorder. In some embodiments, the subject of the disclosure presents at least one sign or symptom of the disease or disorder. In some embodiments, the subject has a biomarker predictive of a risk of developing the disease or disorder. In some embodiments, the biomarker is a genetic mutation.

[0146] In some embodiments of the methods of the disclosure, a subject of the disclosure is female. In some embodiments of the methods of the disclosure, a subject of the disclosure is male. In some embodiments, a subject of the disclosure has two XX or XY chromosomes. In some embodiments, a subject of the disclosure has two XX or XY chromosomes and a third chromosome, either an X or a Y.

[0147] In some embodiments of the methods of the disclosure, a subject of the disclosure is a neonate, an infant, a child, an adult, a senior adult, or an elderly adult. In some embodiments of the methods of the disclosure, a subject of the disclosure is at least 1, 2, 3, 4, 5, 6, 7, 8, 9, 10, 11, 12, 13, 14, 15, 16, 17, 18, 19, 20, 21, 22, 23, 24, 25, 26, 27, 28, 29, 30 or 31 days old. In some embodiments of the methods of the disclosure, a subject of the disclosure is at least 1, 2, 3, 4, 5, 6, 7, 8, 9, 10, 11 or 12 months old. In some embodiments of the methods of the disclosure, a subject of the disclosure is at least 1, 2, 3, 4, 5, 6, 7, 8, 9, 10, 15, 20, 25, 30, 35, 40, 45, 50, 55, 60, 65, 70, 75, 80, 85, 90, 95, 100 or any number of years or partial years in between of age.

[0148] In some embodiments of the methods of the disclosure, a subject of the disclosure is a mammal. In some embodiments, a subject of the disclosure is a non-human mammal.

[0149] In some embodiments of the methods of the disclosure, a subject of the disclosure is a human.

[0150] In some embodiments of the methods of the disclosure, a therapeutically effective amount comprises a single dose of a composition of the disclosure. In some embodiments, a therapeutically effective amount comprises a therapeutically effective amount comprises at least one dose of a composition of the disclosure. In some embodiments, a therapeutically effective amount comprises a therapeutically effective amount comprises one or more dose(s) of a composition of the disclosure. In some embodiments of the methods of the disclosure, a therapeutically effective amount eliminates a sign or symptom of the disease or disorder. In some embodiments, a therapeutically effective amount reduces a severity of a sign or symptom of the disease or disorder.

[0151] In some embodiments of the methods of the disclosure, a therapeutically effective amount eliminates the disease or disorder.

[0152] In some embodiments of the methods of the disclosure, a therapeutically effective amount prevents an onset of a disease or disorder. In some embodiments, a therapeutically effective amount delays the onset of a disease or disorder. In some embodiments, a therapeutically effective amount reduces the severity of a sign or symptom of the disease or disorder. In some embodiments, a therapeutically effective amount improves a prognosis for the subject.

[0153] In some embodiments of the methods of the disclosure, a composition of the disclosure is administered to the subject systemically. In some embodiments, the composition of the disclosure is administered to the subject by an intravenous route. In some embodiments, the composition of the disclosure is administered to the subject by an injection or an infusion.

[0154] In some embodiments of the methods of the disclosure, a composition of the disclosure is administered to the subject locally. In some embodiments, the composition of the disclosure is administered to the subject by an intraosseous, intraocular, intracerebrospinal, or intraspinal route. In some embodiments, the composition of the disclosure is administered directly to the cerebral spinal fluid of the central nervous system. In some embodiments, the composition of the disclosure is administered directly to a tissue or fluid of the eye and does not have bioavailability outside of ocular structures. In some embodiments, the composition of the disclosure is administered to the subject by an injection or an infusion.

[0155] Also provided herein is a pharmaceutical composition comprising any one or more of the capped-sgRNAs and Cas or dCas polypeptide, or the nucleic acid sequences encoding the polypeptide, and a carrier. In some embodiments, a composition can be one or more polynucleotides encoding a capped-guide nucleotide sequence-Cas polypeptide or fusion polypeptide. In some embodiments, a composition can be any of the nucleic acids or proteins described herein. In some embodiments, a composition can be any polynucleotide described herein. In some embodiments, the carrier is a pharmaceutically acceptable carrier. In some embodiments, the composition is a pharmaceutical composition comprising a capped-guide nucleotide sequence-Cas polypeptide or fusion polypeptide, and a pharmaceutically acceptable carrier. In some embodiments, the composition or pharmaceutical composition further comprises one or more gRNAs, capped-sgRNAs, crRNAs, and/or tracrRNAs.

[0156] Briefly, pharmaceutical compositions disclosed herein may comprise a capped-guide nucleotide sequence-Cas polypeptide or fusion polypeptide or a nucleotide sequence encoding the same, optionally comprised in an AAV, which is optionally also immune orthogonal, in combination with one or more pharmaceutically or physiologically acceptable carriers, diluents or excipients. Such compositions may comprise buffers such as neutral buffered saline, phosphate buffered saline and the like; carbohydrates such as glucose, mannose, sucrose or dextrans, mannitol; proteins; polypeptides or amino acids such as glycine; antioxidants; chelating agents such as EDTA or glutathione; adjuvants (e.g., aluminum hydroxide); and preservatives. Compositions of the present disclosure may be formulated for oral, intravenous, topical, enteral, subpial, and/or parenteral administration. In certain embodiments, the compositions of the disclosure are formulated for intravenous administration.

[0157] In some embodiments of the methods of the disclosure, a composition of the disclosure is administered to the subject locally. In some embodiments, the composition of the disclosure is administered to the subject by an intraosseous, intraocular, intracerebrospinal, intraspinal, or subpial route. In some embodiments, the composition of the disclosure is administered directly to the cerebral spinal fluid of the central nervous system. In some embodiments, the composition of the disclosure is administered directly to a tissue or fluid of the eye and does not have bioavailability outside of ocular structures. In some embodiments, the composition of the disclosure is administered to the subject by an injection or an infusion.

[0158] In some embodiments, the compositions disclosed herein are formulated as pharmaceutical compositions. Briefly, pharmaceutical compositions for use as disclosed herein may include a protein(s) or a polynucleotide encoding the protein(s), optionally comprised in an AAV, which is optionally also immune orthogonal, in combination with one or more pharmaceutically or physiologically acceptable carriers, diluents or excipients. Such compositions may include buffers such as neutral buffered saline, phosphate buffered saline and the like: carbohydrates such as glucose, mannose, sucrose or dextrans, mannitol; proteins; polypeptides or amino acids such as glycine; antioxidants; chelating agents such as EDTA or glutathione; adjuvants (e.g., aluminum hydroxide); and preservatives. Compositions of the disclosure may be formulated for oral, intravenous, topical, enteral, intraocular, and/or parenteral administration. In some embodiments, intraocular administration includes, without limitation, subretinal, intravitreal, or topical (via eye drops) administration. In certain embodiments, the compositions of the disclosure are formulated for intravenous administration.

### EXAMPLES

[0159] The following examples are provided to better illustrate the claimed invention and are not to be interpreted as limiting the scope of the invention. To the extent that specific materials are mentioned, it is merely for purposes of illustration and is not intended to limit the invention. One skilled in the art can develop equivalent means or reactants without the exercise of inventive capacity and without departing from the scope of the invention.

### Example 1: Modulation of Translation Using dCas and Capped-sgRNA

[0160] Exemplary constructs for generating nuclease dead Cas (dCas13b) and m7G capped-sgRNA are shown in FIG. 1A. dCas and capped-sgRNA were transcribed from either the same promoter (i), or independent promoters (ii) by RNA polymerase II. An exemplary structure for the unprocessed capped-sgRNA is shown in FIG. 1B. From 5′ to 3′, the capped-sgRNA contains the m7G cap, a linker of variable length, a spacer, a direct repeat, an RNase P processing site such as a tRNA-like small RNA, and a poly-A tail. An exemplary chemical composition of a capped-sgRNA is shown in FIG. 1C. Variants of the m7G cap include either guanosine or adenine for the second nucleotide of the di-nucleotide m7G cap (at the a′ position). FIG. 1D shows RNase P processing to trim downstream sequences, including the poly-A tail, from the transcript. The capped-RNA complexed with dCas, binds to a site on the target messenger RNA thereby bringing the m7G cap of the sgRNA to the vicinity of a desired start codon (FIG. 1E).

[0161] A two construct system was used to test the ability of dCas and capped-sgRNA to regulate translation in trans. The first construct includes a dCas13b gene driven by a PGK promoter, followed by a NLS-Turquoise reporter which is driven by an EF1α promoter. The second construct includes a sequence encoding a capped sgRNA, a 5′UTR region of ATF4, and the ATF4 ORF linked to an NL-Citrine promoter. Both the sequence encoding a capped sgRNA and the ATF4 ORF are driven by a TRE promoter. The second construct further includes an rtTA-P2A-Puro construct linked to an NLS-Cherry reporter via an IRES sequence. The rtTA-P2A-Puro-IRES-NLS-Cherry portion is driven by the EF1α promoter. A number of different types of capped sgRNAs (sg(1), sg(2), sg(3), sg(4), sg(5), sg(6)) were generated, each included a spacer that targets the ATF4 transcript at a different site. The sequences of the sgRNAs are listed in below. The target sequences were within the “sgRNA targeting window” as shown in FIG. 1G. Control capped-sgRNAs were also generated that do not target a sequence within the ATF4 transcript. These control capped-sgRNAs are referred to as non-targeting sgRNAs. Each capped-sgRNA was tested using dCas gradient in combination with a target ATF4 transcript gradient. The plots in FIG. 1H reflect log 2 fold difference in Citrine/Cherry ratio between each capped sgRNA—sg (a1), sg(a2), sg(a3), sg(a4), sg(a5) and sg(a6), and non-targeting sgRNAs. A spacer targeting a region just 3′ proximal to the start codon AUG was shown to result in the biggest increase in protein expression. The results demonstrate that optimal translational control is a function of the target sequence chosen, the expression level of the target RNA, and the expression level of dCas.

[0162] Uncapped-sgRNAs that correspond to each of the capped-sgRNA tested were subjected to the same gradient test. As shown in FIG. 1I, uncapped-sgRNAs were either ineffective in enhancing translation, or only minimally enhanced translation. These results showed that the localized recruitment of the 5′ m7G cap proximal to a start codon enabled an enhancement in translation.

| sgRNA | Sequence |
|---|---|
| sg(1) | TTTGCTGGAATCGAGGAATGTGCTT |
| | (SEQ ID NO: 278) |
| sg(2) | GTTGCGGTGCTTTGCTGGAATCGAG |
| | (SEQ ID NO: 279) |
| sg(3) | TTTCGGTCATGTTGCGGTGCTTTGC |
| | (SEQ ID NO: 280) |
| sg(4) | AGGAAGCTCATTTCGGTCATGTTGC |
| | (SEQ ID NO: 281) |
| sg(5) | CTCGCTGCTCAGGAAGCTCATTTCG |
| | (SEQ ID NO: 282) |
| sg(6) | CCACCAACACCTCGCTGCTCAGGAA |
| | (SEQ ID NO: 283) |

### Additional Embodiments

[0163] Embodiment 1: A capped single guide RNA (Capped-sgRNA) comprising from 5′ to 3′:

[0164] an m7G cap,

[0165] a linker,

[0166] a spacer complementary to a target sequence in a messenger RNA,

[0167] a direct repeat sequence, and

[0168] a Ribonuclease P (RNase P) processing site,

[0169] wherein the direct repeat sequence is capable of binding to a Cas protein.

Embodiment 2: The Capped-sgRNA of Embodiment 1, wherein the Cas protein is a nuclease dead Cas (dCas) protein.
Embodiment 3: The Capped-sgRNA of Embodiment 1, wherein the m7G cap comprises one or more chemical modifications relative to the structure of a naturally occurring m7G cap.
Embodiment 4: The Capped-sgRNA of Embodiment 1, wherein the linker comprises about 5 to about 25 nucleotides.
Embodiment 5: The Capped-sgRNA of Embodiment 4, wherein the linker comprises about 8 to about 20 nucleotides.
Embodiment 6: The Capped-sgRNA of Embodiment 1, wherein the linker is non-complementary to any messenger RNA sequence.
Embodiment 7: The Capped-sgRNA of Embodiment 1, wherein the linker comprises the sequence of GTCAGATCGCCTGGAATT.
Embodiment 8: The Capped-sgRNA of Embodiment 1, wherein the target sequence is proximal to a target start codon of the messenger RNA relative to a 5′ m7G cap of the messenger RNA.
Embodiment 9: The Capped-sgRNA of Embodiment 1, wherein the target sequence comprises the target start codon of the messenger RNA.
Embodiment 10: The Capped-sgRNA of Embodiment 8, wherein the 5′ end of the target sequence is upstream to the target start codon of the messenger RNA.
Embodiment 11: The Capped-sgRNA of Embodiment 8, wherein the 5′ end of the target sequence is downstream to the target start codon of the messenger RNA.
Embodiment 12: The Capped-sgRNA of Embodiment 1, wherein the spacer is at least 80% complementary to the target sequence in the messenger RNA.
Embodiment 13: The Capped-sgRNA of Embodiment 1, wherein the spacer is at least 90% complementary to the target sequence in the messenger RNA.
Embodiment 14: The Capped-sgRNA of Embodiment 1, further comprising a polyadenylated tail.
Embodiment 15: The Capped-sgRNA of Embodiment 1, having the structure:

[chemical structure]

[0170] wherein a′ is a guanosine or adenine, b′ is the linker, and c′ is the spacer.

Embodiment 16: An expression vector encoding the Capped-sgRNA of Embodiment 1.
Embodiment 17: The expression vector of Embodiment 16, further encodes a nuclease dead Cas9.
Embodiment 18: A Capped-sgRNA generated by processing the Capped-sgRNA of Embodiment 1 using an RNase P.
Embodiment 19: An expression vector comprising a nucleic acid sequence encoding:

[0171] a nuclease dead Cas (dCas), and

[0172] a capped single guide RNA (Capped-sgRNA) comprising
[0173] an m7G cap,
[0174] a linker,
[0175] a spacer complementary to a target sequence in a messenger RNA, and
[0176] a direct repeat sequence, wherein the direct repeat sequence is capable of binding to the dCas protein.
   Embodiment 20: The expression vector of Embodiment 19, wherein the Capped-sgRNA further comprises a Ribonuclease P (RNase P) processing site.
   Embodiment 21: The expression vector of Embodiment 19, wherein the Capped-sgRNA further comprises a polyadenylated tail.
   Embodiment 22: The expression vector of Embodiment 19, wherein the dCas and the Capped-sgRNA are under the control of the same promoter.
   Embodiment 23; The expression vector of Embodiment 19, wherein the dCas and the Capped-sgRNA are under the control of different promoters.
   Embodiment 24: A method of enhancing protein translation comprising:

[0177] (a) providing a nuclease dead Cas (dCas) protein, and
[0178] a capped single guide RNA (Capped-sgRNA) comprising from 5′ to 3′:
   [0179] an m7G cap,
   [0180] a linker,
   [0181] a spacer complementary to a target sequence in a messenger RNA, and
   [0182] a direct repeat sequence,
   [0183] wherein the direct repeat sequence is capable of binding to the dCas protein, and wherein the target sequence is proximal to a start codon of the messenger RNA relative to a 5′ m7G cap of the messenger RNA.
[0184] (b) allowing the Capped-sgRNA to bind to the target sequence and the dCas protein to bind to the direct repeat sequence of the Capped-sgRNA, thereby localizing the m7G cap of the Capped-sgRNA to the target sequence.

### Other Embodiments

[0185] It is to be understood that while the invention has been described in conjunction with the detailed description thereof, the foregoing description is intended to illustrate and not limit the scope of the invention, which is defined by the scope of the appended claims. Other aspects, advantages, and modifications are within the scope of the following claims.

1. A complex comprising:
a Cas polypeptide; and
a capped-sgRNA comprising
(i) an m7G cap or an analog thereof;
(ii) a spacer capable of specifically hybridizing with a target sequence in an RNA molecule; and
(iii) a direct repeat capable of binding to the Cas polypeptide.

2. The complex of claim 1, wherein the RNA molecule is a messenger RNA (mRNA).

3. The complex of claim 2, wherein the mRNA has an endogenous m7G cap.

4. The complex of claim 3, wherein the target sequence is downstream of the endogenous m7G cap of the mRNA.

5.-12. (canceled)

13. The complex of claim 1, wherein the spacer is at least 80% complementary to the target sequence.

14.-17. (canceled)

18. The complex of claim 1, wherein the spacer is connected to the m7G cap or analog thereof via a linker.

19.-22. (canceled)

23. The complex of claim 1, wherein the Cas polypeptide is a nuclease-deficient Cas (dCas) polypeptide, wherein the dCas comprises an inactivated target cleavage domain and a retained guide cleavage domain.

24. The complex of claim 23, wherein the nuclease-deficient Cas polypeptide is a nuclease-deficient Cas13 (dCas13) polypeptide, wherein the dCas13 is dCas13b or dCas13d.

25. The complex of claim 24, wherein the direct repeat is capable of binding to a nuclease-deficient Cas13 (dCas13) polypeptide, wherein the dCas13 is dCas13b or dCas13d.

26. The complex of claim 23, wherein the nuclease-deficient Cas polypeptide is a nuclease-deficient Cas9 (dCas9) polypeptide.

27. (canceled)

28. A nucleic acid comprising a sequence encoding the capped-sgRNA in the complex of claim 1.

29. (canceled)

30. A nucleic acid comprising a sequence encoding a capped-sgRNA, wherein the capped-sgRNA comprises:
(i) an m7G cap or analog thereof;
(ii) a spacer capable of specifically hybridizing with a target sequence in an RNA molecule; and
(iii) a direct repeat capable of binding to a Cas polypeptide.

31. The nucleic acid of claim 30, wherein the RNA molecule is an mRNA.

32.-54. (canceled)

55. The nucleic acid of claim 30, further comprising a sequence encoding the Cas polypeptide.

56. The nucleic acid of claim 55, wherein the Cas polypeptide is a nuclease-deficient Cas polypeptide.

57.-60. (canceled)

61. The nucleic acid of claim 55, wherein the sequence encoding the capped-sgRNA and the sequence encoding the Cas polypeptide are expressed from the same promoter.

62. The nucleic acid of claim 55, wherein the sequence encoding the capped-sgRNA and the sequence encoding the Cas polypeptide are expressed from different promoters.

63. A vector comprising the nucleic acid of claim 30.

64. (canceled)

65. A cell comprising the nucleic acid of claim 30.

66. A method of regulating translation of an mRNA in a cell, the method comprising contacting the cell with a nucleic acid comprising
(a) a sequence encoding a Cas polypeptide; and
(b) a sequence encoding a capped-sgRNA comprising
(i) an m7G cap or analog thereof;
(ii) a spacer capable of specifically hybridizing with a target sequence in an RNA molecule; and
(iii) a direct repeat capable of binding to the Cas polypeptide.

67.-70. (canceled)

The application's sequence listing, which the Patent Office published only in electronic form, follows.

SEQUENCE LISTING (277 sequences)

SEQ ID NO: 1 - protein, 954 aa, Artificial Sequence
  Eubacterium siraeum nCas1
MGKKIHARDLREQRKTDRTEKFADQNKKREAERAVPKKDAAVSVKSVSSVSSKKDNVTKSMAKAAGVKSVFAVGNTVYMTSFGRGNDAVLEQKIVDTSHEPLNIDDPAYQLNVVTMNGYSVTGHRGETVSAVTDNPLRRFNGRKKDEPEQSVPTDMLCLKPTLEKKFFGKEFDDNIHIQLIYNILDIEKILAVYSTNAIYALNNMSADENIENSDFFMKRTTDETFDDFEKKKESTNSREKADFDAFEKFIGNYRLAYFADAFYVNKKNPKGKAKNVLREDKELYSVLTLIGKLRHWCVHSEEGRAEFWLYKLDELKDDFKNVLDVVYNRPVEEINNRFIENNKVNIQILGSVYKNTDIAELVRSYYEFLITKKYKNMGFSIKKLRESMLEGKGYADKEYDSVRNKLYQMTDFILYTGYINEDSDRADDLVNTLRSSLKEDDKTTVYCKEADYLWKKYRESIREVADALDGDNIKKLSKSNIEIQEDKLRKCFISYADSVSEFTKLIYLLTRFLSGKEINDLVTTLINKFDNIRSFLEIMDELGLDRTFTAEYSFFEGSTKYLAELVELNSFVKSCSFDINAKRTMYRDALDILGIESDKTEEDIEKMIDNILQIDANGDKKLKKNNGLRNFIASNVIDSNRFKYLVRYGNPKKIRETAKCKPAVRFVLNEIPDAQIERYYEACCPKNTALCSANKRREKLADMIAEIKFENFSDAGNYQKANVTSRTSEAEIKRKNQAIIRLYLTVMYIMLKNLVNVNARYVIAFHCVERDTKLYAESGLEVGNIEKNKTNLTMAVMGVKLENGIIKTEFDKSFAENAANRYLRNARWYKLILDNLKKSERAVVNEFRNTVCHLNAIRNININIKEIKEVENYFALYHYLIQKHLENRFADKKVERDTGDFISKLEEHKTYCKDFVKAYCTPFGYNLVRYKNLTIDGLFDKNYPGKDDSDEQK

SEQ ID NO: 2 - protein, 954 aa, Artificial Sequence
  Eubacterium siraeum nCas1 HEPN-/-
MGKKIHARDLREQRKTDRTEKFADQNKKREAERAVPKKDAAVSVKSVSSVSSKKDNVTKSMAKAAGVKSVFAVGNTVYMTSFGRGNDAVLEQKIVDTSHEPLNIDDPAYQLNVVTMNGYSVTGHRGETVSAVTDNPLRRFNGRKKDEPEQSVPTDMLCLKPTLEKKFFGKEFDDNIHIQLIYNILDIEKILAVYSTNAIYALNNMSADENIENSDFFMKRTTDETFDDFEKKKESTNSREKADFDAFEKFIGNYRLAYFADAFYVNKKNPKGKAKNVLREDKELYSVLTLIGKLAHWCVASEEGRAEFWLYKLDELKDDFKNVLDVVYNRPVEEINNRFIENNKVNIQILGSVYKNTDIAELVRSYYEFLITKKYKNMGFSIKKLRESMLEGKGYADKEYDSVRNKLYQMTDFILYTGYINEDSDRADDLVNTLRSSLKEDDKTTVYCKEADYLWKKYRESIREVADALDGDNIKKLSKSNIEIQEDKLRKCFISYADSVSEFTKLIYLLTRFLSGKEINDLVTTLINKFDNIRSFLEIMDELGLDRTFTAEYSFFEGSTKYLAELVELNSFVKSCSFDINAKRTMYRDALDILGIESDKTEEDIEKMIDNILQIDANGDKKLKKNNGLRNFIASNVIDSNRFKYLVRYGNPKKIRETAKCKPAVRFVLNEIPDAQIERYYEACCPKNTALCSANKRREKLADMIAEIKFENFSDAGNYQKANVTSRTSEAEIKRKNQAIIRLYLTVMYIMLKNLVNVNARYVIAFHCVERDTKLYAESGLEVGNIEKNKTNLTMAVMGVKLENGIIKTEFDKSFAENAANRYLRNARWYKLILDNLKKSERAVVNEFANTVCALNAIRNININIKEIKEVENYFALYHYLIQKHLENRFADKKVERDTGDFISKLEEHKTYCKDFVKAYCTPFGYNLVRYKNLTIDGLFDKNYPGKDDSDEQK

SEQ ID NO: 3 - protein, 919 aa, Artificial Sequence
  Uncultured Ruminococcus sp. nCas1
MAKKNKMKPRELREAQKKARQLKAAEINNNAAPAIAAMPAAEVIAPAAEKKKSSVKAAGMKSILVSENKMYITSFGKGNSAVLEYEVDNNDYNQTQLSSKDNSNIQLGGVNEVNITFSSKHGFESGVEINTSNPTHRSGESSPVRGDMLGLKSELEKRFFGKTFDDNIHIQLIYNILDIEKILAVYVTNIVYALNNMLGVKGSESHDDFIGYLSTNNIYDVFIDPDNSSLSDDKKANVRKSLSKFNALLKTKRLGYFGLEEPKTKDNRVSQAYKKRVYHMLAIVGQIRQCVFHDKSGAKRFDLYSFINNIDPEYRDTLDYLVEERLKSINKDFIEDNKVNISLLIDMMKGYEADDIIRLYYDFIVLKSQKNLGFSIKKLREKMLDEYGFRFKDKQYDSVRSKMYKLMDFLLFCNYYRNDIAAGESLVRKLRFSMTDDEKEGIYADEAAKLWGKFRNDFENIADHMNGDVIKELGKADMDFDEKILDSEKKNASDLLYFSKMIYMLTYFLDGKEINDLLTTLISKFDNIKEFLKIMKSSAVDVECELTAGYKLFNDSQRITNELFIVKNIASMRKPAASAKLTMFRDALTILGIDDKITDDRISGILKLKEKGKGIHGLRNFITNNVIESSRFVYLIKYANAQKIREVAKNEKVVMFVLGGIPDTQIERYYKSCVEFPDMNSSLGVKRSELARMIKNISFDDFKNVKQQAKGRENVAKERAKAVIGLYLTVMYLLVKNLVNVNARYVIAIHCLERDFGLYKEIIPELASKNLKNDYRILSQTLCELCDKSPNLFLKKNERLRKCVEVDINNADSSMTRKYRNCIAHLTVVRELKEYIGDICTVDSYFSIYHYVMQRCITKRENDTKQEEKIKYEDDLLKNHGYTKDFVKALNSPFGYNIPRFKNLSIEQLFDRNEYLTEK

SEQ ID NO: 4 - protein, 919 aa, Artificial Sequence
  Uncultured Ruminococcus sp. nCas1 HEPN-/-
MAKKNKMKPRELREAQKKARQLKAAEINNNAAPAIAAMPAAEVIAPAAEKKKSSVKAAGMKSILVSENKMYITSFGKGNSAVLEYEVDNNDYNQTQLSSKDNSNIQLGGVNEVNITFSSKHGFESGVEINTSNPTHRSGESSPVRGDMLGLKSELEKRFFGKTFDDNIHIQLIYNILDIEKILAVYVTNIVYALNNMLGVKGSESHDDFIGYLSTNNIYDVFIDPDNSSLSDDKKANVRKSLSKFNALLKTKRLGYFGLEEPKTKDNRVSQAYKKRVYHMLAIVGQIAQCVFADKSGAKRFDLYSFINNIDPEYRDTLDYLVEERLKSINKDFIEDNKVNISLLIDMMKGYEADDIIRLYYDFIVLKSQKNLGFSIKKLREKMLDEYGFRFKDKQYDSVRSKMYKLMDFLLFCNYYRNDIAAGESLVRKLRFSMTDDEKEGIYADEAAKLWGKFRNDFENIADHMNGDVIKELGKADMDFDEKILDSEKKNASDLLYFSKMIYMLTYFLDGKEINDLLTTLISKFDNIKEFLKIMKSSAVDVECELTAGYKLFNDSQRITNELFIVKNIASMRKPAASAKLTMFRDALTILGIDDKITDDRISGILKLKEKGKGIHGLRNFITNNVIESSRFVYLIKYANAQKIREVAKNEKVVMFVLGGIPDTQIERYYKSCVEFPDMNSSLGVKRSELARMIKNISFDDFKNVKQQAKGRENVAKERAKAVIGLYLTVMYLLVKNLVNVNARYVIAIHCLERDFGLYKEIIPELASKNLKNDYRILSQTLCELCDKSPNLFLKKNERLRKCVEVDINNADSSMTRKYANCIAALTVVRELKEYIGDICTVDSYFSIYHYVMQRCITKRENDTKQEEKIKYEDDLLKNHGYTKDFVKALNSPFGYNIPRFKNLSIEQLFDRNEYLTEK

SEQ ID NO: 5 - protein, 408 aa, Artificial Sequence
  Gut_metagenome_contig2791000549
MKQNDRENNNKIKKSAAKAVGVKSLARLSDGSTVVSSFGKGAAAELESLITGGEIRKLSDKAILEITDDTQNKNAYNVKSSRIPNLTARTDKLSDKSGMDDLGFKRELELEVFGQCFDDSIHIQIAHAVFDIQKSLAAVIPNVLYTLNNLDRSYSTDNTSDKKDIIGNTLNYQHSYESFNVEKRGEFTEYYNAAKDRFSYFPDILCVLEKVNGKDRYQPKSEKDAFNVLSSVNMLRNSLFHFAPKSNDGKARIAVFKNQFDSDFSHITSTVNKIYSAKIAGVNENFLNNEGNNLYIILKATNWDIKKIVPQLYRFSVLKSDKNMGFNMRKLREFAVESKNIDLSRLNDKFLTNNRKKLYKVIDFIIYYHLNKVLKDSFVDDFVAALRASQSEEEKEKLYAQYSERLFA

SEQ ID NO: 6 - protein, 295 aa, Artificial Sequence
  Gut_metagenome_contig855000317
TDNPLHGAGGIARDHSDLIHARKALEMRYYGQTFEDNIHIQLIYNILDIEKILSVHINNIVYTLNNLLRPLTDNNFDFIGELSTYRDYEKFLEVSEIEYIIDENGEEKQNKEYTKRKLFFRLCYMPQLRYFNIIVEGPHEPVVQVENPELLKKIEASRISDRAKTVTFNEKEFYNVLIALGTLRQMEAHGNPLINIYQFDKKQNVYSTLTKKYKERVITLDNGFLSRAKKNLIILFRAYGIEDAEEKKQYIRNYYDFTVRKNYKNQGFSIKTLREHITTDIEEAIQLRSTAFDSV

SEQ ID NO: 7 - protein, 159 aa, Artificial Sequence
  Gut_metagenome_contig3389000027
PEKAAFTVHNDCEAFFEIDGRVQRAVADNPLHKYEKDDHGQDRISREKLEMRYYGRTFEDNIHIQVIYNILDIEKIMSIHINNIIFTINNLLRREEEDFSDLIGYITLCEKYEDLSKKGREEIRDSFDRLCKAPQLAYYNFQIEKKGKKDPNAIILTEK

SEQ ID NO: 8 - protein, 108 aa, Artificial Sequence
  Gut_metagenome_contig8061000170
EVTGRGQGATADNPLYKYSQKKAWDRQDRISKDKLELRYYGQTFEDNIHIQTIYNILDIEKILSIHINNIVFTINNLLRNDNDEQDDIVGYISLCKKYADLSKEKNAE

SEQ ID NO: 9 - protein, 237 aa, Artificial Sequence
  Gut_metagenome_contig1509000299
MKSTFVLGENNLLMTSFGKGNKAVVEKQIRDQQITDLSDPSAFTVKQDKDLHFNIDGRVRGASTDNPFHHNPEKTAQPPVRDDLIHARSFLEKRYYGENFTDNIHIQCIYSILDVEKILVSHINNIVYMLNNFLREEGETLTDLIGYLSIFKSYEGLMNSTRNDAAEMRRHFFSLCQAKQLGYLNLEVLKPQPDKPKQGKKKPADPNTIKLTEEEFFNVLLALSNMRQMLVHGNAKQ

SEQ ID NO: 10 - protein, 214 aa, Artificial Sequence
  Gut_metagenome_contig9549000591
KAKLEKRYFGQTFEDNIHIQVIYNMLDIEKILTIHVNNIVFTINNFLREEGEDLTDIVGYITKYKSLAKFKENKNAREYYELFCKLCDAKQLGYLNLEYNSVRSKLYKLFDFILVHHYKNDSSPESTALKNLLRTCLTDEEKEKVYVQTAKELTALYSYHFKEASVSVNARNIKEYQEKAQVYHISIADKISSTGIGLFSQLIYMLTLLLDGKE

SEQ ID NO: 11 - protein, 422 aa, Artificial Sequence
  Gut_metagenome_contig71000500
MKKQKSKKTVSKTSGLKEALSVQGTVIMTSFGKGNMANLSYKIPSSQKPQNLNSSAGLKNVEVSGKKIKFQGRHPKIATTDNPLFKPQPGMDLLCLKDKLEMHYFGKTFDDNIHIQLIYQILDIEKILAVHVNNIVFTLDNVLHPQKEELTEDFIGAGGWRINLDYQTLRGQTNKYDRFKNYIKRKELLYFGEAFYHENERRYEEDIFAILTLLSALRQFCFHSDLSSDESDHVNSFWLYQLEDQLSDEFKETLSILWEEVTERIDSEFLKTNTVNLHILCHVFPKESKETIVRAYYEFLIKKSFKNMGFSIKKLREIMLEQSDLKSFKEDKYNSVRAKLYKLFDFIITYYYDHHAFEKEALVSSLRSSLTEENKEEIYIKTARTLASALGADFKKAAADVNAKNIRDYQKKANDYRISFED

SEQ ID NO: 12 - protein, 49 aa, Artificial Sequence
  Artificial sequence
IKIGNTGIGYFSELIYMLTLLLDGKEINDLLTTLINKFDNIISFIDILK

SEQ ID NO: 13 - protein, 148 aa, Artificial Sequence
  Gut_metagenome_contig3915000357
MKDKLEQWYFDKTFDDNIHIQLIYQIQDIEKILASHVNNIVFALDNILHATESETGDFLGMGYMRATNTFEEYRDSAISNVKKSYETFETYIKKKELLYFGEAFYHGNTCRKPEDIYHILAMVSSLRQFCFHSTFDDKSKSIKGSWLY

SEQ ID NO: 14 - protein, 137 aa, Artificial Sequence
  Gut_metagenome_contig4719000173
KNVITSRSFYYLVRYAKPTAVRKLMSNPKIVRYVLKRLPENQVASYYSAIWTQSESNSNETVKLIEMIDRLTTEIAGFSFAVLKDKKDSIVSASRESRAVNLEVERLKKLTTLYMSIAYIAVKSLVKVNARYFIAYS

SEQ ID NO: 15 - protein, 95 aa, Artificial Sequence
  Gut_metagenome_contig6929000468
MKTIKKSSKAYGLKSTFAYNDDVYMTSFGKGNDFVMEKLIYPNDNVEDLSDNPKFDVEVENKDITLKYKKSEINVNNPAKSGIKQDYLMLKDKLE

SEQ ID NO: 16 - protein, 114 aa, Artificial Sequence
  Gut_metagenome_contig7367000486
NRLKTKADLERLFSNRRIGYFGQAFYESDKQQRNEMEIYDNLALIGSLRQWAVHGNKTNDPAWLYKLESLPDEFKSVLDKVYAETVRKVNYKFIKTNAVNLQILQELYPKESFA

SEQ ID NO: 17 - protein, 107 aa, Artificial Sequence
  Gut_metagenome_contig7930000403
YAKIIIGEITSKYNKFDDIINLVYREIRNRNNTINFKNEIKNISTITNYSYFTKFIYFITKFLDGKEINELLTSLINKFDNIQAFNDILLEKLQDKNESKFAIFNGK

SEQ ID NO: 18 - protein, 282 aa, Artificial Sequence
  Gut_metagenome_contig993000527
NIDSLTAVYKGVNNQNRVEFGDKYDMFNKAGEICESLRSINSFARMESPAPAAKRTMFVDAIRMFGFADVSDNDAEKFYKENIEPFIYDRNGDIEDEWKKGKLVHKKDEKKKGVYNFIATNVIESNRFQYLVRYANTEKIAALARNETIVRFVIKKLPAAQIVRYYIACNRIRENINSNVLTSDDMAESLVKLVTGMDFGKIKGVRNDDRSGDKEMKKAIVTLYLTILYHLTKNLVYVNSRYFMAFHCLERDMNLFGEGQKQALRNTGDYPADNADLRRSDI

SEQ ID NO: 19 - protein, 118 aa, Artificial Sequence
  Gut_metagenome_contig6552000639
AVDLNPDDPAFNVNEVTEERFILDHGRIKGCIATADNPLHASSAPQDMLLLKSVLEERFFGMSFPEDNVHIQLIYNILDIEKILTVYSTNAVYAINNLFRADDQEDDEFIGDLSVDTS

SEQ ID NO: 20 - protein, 87 aa, Artificial Sequence
  Gut_metagenome_contig11932000246
RIVNSFAHMKKESMSAKKIMFDEALIVLGIDDAEKERELDQMLDKDARKQNPQRAGLRNFIANNVIESDRFKYLVRYGNVKRIKGIA

SEQ ID NO: 21 - protein, 85 aa, Artificial Sequence
  Gut_metagenome_contig12963000286
EKETELNLMLDKDARKQNRQKAGLRNFIANNVIESERFKYLVRYGNVKRIKGLSTNSQVMGFVLKDIADAQIVRYYRSIYGDDNC

SEQ ID NO: 22 - protein, 155 aa, Artificial Sequence
  Gut_metagenome_contig2952000470
IRLPNGTIMDECDVSKATTVKNRYLHNKKWYSLAFTNYKNSDSDVIVNFRNSVAHLNAIRNIDEYIDGIGEINSHTGYFEIYHYIIQKRMQAVTTDKSKLQPKTEEYFENLSKYHTYCKDFVKAYCVPMAYNLPRYKNLTIDGQFDRNIHTETKE

SEQ ID NO: 23 - protein, 406 aa, Artificial Sequence
  Gut_metagenome_contig451000394
LQELYPKESFASIVKEYYGFLVTKKYKNIGFSIKHLREILLDSTDYRDKEYDSVRHKLYQLLDFCIYHGYLYEDAEFAADLVNQLRASLSELDKEKIYNIEAARLADKLGSSLFSYLRRSVVGKNIQQLKKNAENLEKVKLEDIQISSGKTVSYFTKLMYLLTLFLDGKEINDLLTTLINKFDNIRVFNKTLTQLNQSTEFVEDYSFFGSSGTVFEELTVLNSFARMSRIDPSARKDMYRDAIEILGISMEMSHEKFEEMLDRILCYDEEGNPIINPDGTKKSGMRNFIATNIISSNRFKYLVRYGNATKIRALANCENAVKFVLSTIPDEQIVRYFDSCREPTDHIENNIERKREYLASIIKEMSFERFRDAEKLQRYHVDRPTNGSSVEGEQKQRYQAVIRLYL

SEQ ID NO: 24 - protein, 954 aa, Artificial Sequence; identical to SEQ ID NO: 1
  Eubacterium_siraeum_DSM_15702

SEQ ID NO: 25 - protein, 173 aa, Artificial Sequence
  gut_metagenome_P19E0k2120140920,_c369000003
DGKEINDLVTTLINKTENIASFNEVLKQLGYELDYSEEYSVFAASDEMASQLRALNSFARMEKPDASAKRIMFVEAARMLGDDSSYEELKAYFDDILAKKSKKEFDAATDNEAIRATDKKKKGFRNFIINNVIESDRFKYLIRYCNVESVQAFSKNRKLVKFVLKDIPESQIL

SEQ ID NO: 26 - protein, 111 aa, Artificial Sequence
  Gut_metagenome_contig7593000362
RMSEEAPSAKKVMYVEAAKVLGYSEPEEDLETYIEGILDKKKNVDASGKKNMNFRNFIANNVIESRRFKYLVRYCNPEKIRAMAENRKVVSFVLKGIPDAQIRAYYNSCNG

SEQ ID NO: 27 - protein, 86 aa, Artificial Sequence
  Gut_metagenome_contig12619000055
KLNAGFADKAKTDMQVLLDVLKIKGQEKEIEIAQNYYEFIVKKGYKNEGFSIKKLRQKLTSLSESEKEPLNSMRYDSVRPKLNHLL

SEQ ID NO: 28 - protein, 236 aa, Artificial Sequence
  Gut_metagenome_contig1405000151
KELFQKLCKAPQLAYFNLQIETEGKRKADPNAIKLTQEDFFSILYTLGYMRQMLMHGAPNQNIYKMDPLKDKTFKNCLDCLNRLYNERVMALNNNFLDLAKKNLSILFDVFAVKTQEEKAEYVRDYYDFVVRKQFKNQGFSIKCLREHMTDDIEEAGTLRDQKYDSVRGKLYPFINFAIFRYYNSHSSEAEALVERLRASMNEEEKDKVYRHEAVILWSKIRNLVLKHILPEMEGS

SEQ ID NO: 29 - protein, 103 aa, Artificial Sequence
  Chicken_gut_metagenome_c298474
SDHDKKALVQEYYEFVVLKNYKNLGFSIRRLRDTIIARETGADILSDTEYDTVRSKLYRAMDFKIYLYYQEHPEKAKTLIECLRASTEEAEKEWIYRREASAV

SEQ ID NO: 30 - protein, 225 aa, Artificial Sequence
  Gut_metagenome_contig1516000227
NKFDGESCKSFPLLMYLLCKFLDAKEVNELLTSIINKLENIESLIDALVTLNKWDGFSSNYSLFDKQNIRSLINDFRLVKNLSSSKRKLKKAKQYEYQKNKQLYADAINLFKKDNFVHLNDEEGTGLDLYLSTLLTKKSGNRGDKVKNFIESAIIKNRRFVYLIRYADPEKCYKLVHNEKMLRFVLGEYNEEMMPLSQLQKYYNAVTENNDSNCENRNKMIDTLV

SEQ ID NO: 31 - protein, 210 aa, Artificial Sequence
  Gut_metagenome_contig1838000319
LEYQITPENDVVKLPVSNSSSITVNSANDNIFEVTTSRSDLKDLEAKPSNPTKKSKSSEKSPRQDMLGLKSALEKEYFGKEFNDNIHIQIIHCIQDIEKILAVYSTNANYALVNLLGHNFKDESGKREDFLGSDAFKIEMSYESFSAPANETKLSSEKERTRENEEKRLKYLEDFNNMTDPDNYDKRLGYFGEAFFKPSKNRGKDTVADT

SEQ ID NO: 32 - protein, 84 aa, Artificial Sequence
  Gut_metagenome_contig13123000268
SPKDAGLAYRPAGVRPDQIGAKAALEKRYFGKETPGDNIHVQIAYQIQDIEKLLAVYISNIIYAVNNVTGVSAMKDSKGRPVDL

SEQ ID NO: 33 - protein, 115 aa, Artificial Sequence
  Gut_metagenome_contig5294000434
DKVVHVNVAQGIRDFIEDFKSNSDFSMNSYFELYNYLMQRMLVNEYTKKANDFKVEVPELLITYKNNLDKYKTYDRNFLHIINMPFAYNLARYKNLTIEDIFYDNYKDKLKTKRG

SEQ ID NO: 34 - protein, 377 aa, Artificial Sequence
  Gut_metagenome_contig6415000192
VNSDASDFCKLIYVFTRFLDGKEINILLNSLIKKFQDIHSFNTTVKKLSENNLIINADYVDDYSLFEQSGTVARELMLIKSISKMDFGLDNINLSFMYDDALRTLGVSDENLPEVKREYFGKTKNLSAYIRNNVLENRRFKYVIKYIHPSDVQKIACNKAIAGFVLNRMPDTQIKRYYDSLINKGATDIQAQAKALLDCITGISFDAIKDDKHLHKSKEKSPQRSADRERKKAMLTLYYTIVYIFVKQMLHINSLYTIGFFYLERDQRFIYSRAKKENKNPSKNSYLNDFRSVTAYFIPSEIMKRIEKNENKGFLEDFEALWNSCGKTSRLRKEDVLLYARYISPDHALKNYKMILNSYRNKIAHINVIMSAGKYTG

SEQ ID NO: 35 - protein, 123 aa, Artificial Sequence
  Gut_metagenome_contig6144000300
NKDILKLVIQELPETQILRYYSTIGKNKTTSIDEMKQCLIDAIYNFNIDDTLNAIGDSRVINEKKEQSKAIINLYLTVIYLVTKNMVKINTRFSIAFACLERDYYLHFGQPNGKLLYLQLTEE

SEQ ID NO: 36 - protein, 101 aa, Artificial Sequence
  Gut_metagenome_contig9118000041
DTDCDTQYELFNGDNPGKLANELRICKSLSRMKPEMDEIKKPLYKDALNILNIGNEEFDENTFEFLNREKGDHKLRNFIVNNVIESTRFMYVVKYMNPSNC

SEQ ID NO: 37 - protein, 331 aa, Artificial Sequence
  Activated_sludge_metagenome_transcript_124486
MVKTKAEIHQILRFLGTIRQCLAHKKDAKWDIIFNPDSMSNEFKTLIDSYYNGRVKALNDDFIKHNRSSSLPILFHYYGATEENRRAELTEGFYDFIIKRENKNMGFSLKKIREKMLEKQEASFIKEDGYNSVRHKLYILMDFIIYKTYAADIELQESIVATLRSNLTDEDKEATYEIQAKALWNKIGDDIVKKLMPLIDGNKIKGYKDEKIEIKKEWLKDVMISTENASYMTKMVYFMTLFLDGKEINEFLTVLINKFENIQGFFDVLGHNALAEKIEEPKEISKRPLKGFAELAAFTQKSTDVGLTEHLRLFENSVNISDEIRVTKNFA

SEQ ID NO: 38 - protein, 245 aa, Artificial Sequence
  Gut_metagenome_contig1322000437
INELLTTLINKFDDIQSLMDIATSKQVNVPCKFTSDYSIFNNSSRIVKELNVVKNVARMQKPTASVKTDMLMDALTLLGTDDTMDSEKLRNYVRVQIMKLDAEGKTSKSDDHTLRNFLINNVINSSRFIYVIKYVKADTAYALGHNRKAVAYVLHRIPEQQIDRYYSSCIDRDAGNRMEKENALVDMIVKLSFRDIENVSNDNEKASEKQRYRAVVGLYLTVIYELVKNIVNINSRYVIAFHSLE

SEQ ID NO: 39 - protein, 139 aa, Artificial Sequence
  Gut_metagenome_contig4582000531
SNDHALRNFIVNNVISSSRFTYIIKFINANIAYKIGHNRKAVSYVIKKLPPDQIDRYFTSCIGQESKQAEISDKRQALIDMITTLDYYRFTDINNEDIQKKEQYKAIIGLYLTVVYRLVKNIVNINSRYVIAFHCLERD

SEQ ID NO: 40 - protein, 100 aa, Artificial Sequence
  Gut_metagenome_contig9190000283
FVLNSIPDLQLDRYYKAITGKSDGNRVEKTDIIMDKLMKLDFNQLKVNEDQMGKKNIYFVEKLKALVGLYLTIIYLLTKSLVKINSIYILAFSCFERDYR

SEQ ID NO: 41 - protein, 213 aa, Artificial Sequence
  Gut_metagenome_contig1709000510
PKFKSGSHAQKYYGFIIFKSHKNLGFSIKELRKKLFDIEDAKAFSKKQYDSVRFKMNKLIDFFITYHYTTIDKKQADKLVSKLRYSIDEKEKDDIYTTEAEDLWNKYKSSFEQIRAYVSPDIITEYEHQATNFEYEIKKFDPSTELKTFFSKMIYVLCMFLDGKEINELLSTLINKFDNIDSFITTSEGITDECRFTGTGEKKNIYDIFNASG

SEQ ID NO: 42 - protein, 946 aa, Artificial Sequence
  M24_(LSQX01212483_Anaerobic_digester_metagenome)
MNNKRKTKAKAAGLKSVFFDQKQAVLTTFAKGNNSQIEKKVVNSEVKDLRQPPAFDLELKEKTFYISGKNNINTSRENPLASASLPLSKRQRIRAERIKRAREENRPYHNVKRVGEDDLRAKADLEKHYFGKEYSDNLKIQIIYNILDINKIISPYINDIVYSMNNLARNDEYIDGKIDVIGSLSSTTDYSSFMSPNKDLEKEKKFSFHRENYKKFVEASKPYMRYYGKVFIRDVKKSKLSTGKGEKIEVMYRSDEEIFTIFQILSYVRQSIMHNDIGNKSSILAIEKYPARFVGFLSDLLKTKTNDVNRMFIDNNSQTNFWVLFSIFGLQDHTSGADKICRNFYDFVIKADSKNLGFSLKKIRELMLDLPNANMLRDHQFDTVRSKFYTLLDFIIYQHYLEEKSRIDNMVEKLRMTLKEEEKEVLYAAEAKIVWNAIGAKVINKLVPMMNGDALKEIKRKNRDRKLPQSVIATVQVNSDANVFSGLIYFLTLFLDGKEINEMVSNLITKFENIDSLLHVDREIYKSDEKDLDLEIEKLALFFKGVVRPNAKTDTGAGEISKSFSIFQSAERIIEELKFIKNVTRMDNEIFPSEGVFLDAANVLGVRGDDFDFSNEFVGDDLHSDANKKIINKINGTKEDRNLRNFIINNVVKSRRFQYIARHMNTHYVKQLANNETLNRFVLNKMGDAKIINRYYESISGNTPNIEVRSQIDYLVKRLRSFSFEDLNDVKQKVRPGTNESIEKEKKKALVGLCLTIQYLVYKNLVNINARYTTAFYCLERDSKLKGFGVDVWRDFESYTALTNHFIKEGYLPVRKAEILRANLKHLDCEDGFKYYRNQVTHLNAIRVAYKYINEIKSVHSYFALYHYIMQRHLYDSLQAKAKDSSGFVIDALKKSFEHKIYSKDLLHVLHSPFGYNTARYKNLSIEALFDKNESRPEVNPLSTND

SEQ ID NO: 43 - protein, 150 aa, Artificial Sequence
  Gut_metagenome_contig3833000494
EEASDFKDKKNDSDRRKLYKLMDFCIFYLYYSDSKRNEDLVSRLRESLTDENKDIIYSKEAKTVWNELRKKFSTILDNVKGANIKKLEDVKEKFISEDEFDDIKLDIDISYFSKLMYVMCYFLDGKKINDLLTTLVSKFDNIGSIIEAAK

SEQ ID NO: 44 - protein, 123 aa, Artificial Sequence
  Activated_sludge_metagenome_transcript_117355
MEKMEKIRKSENRKSRAKAAGLKSTFVVADKLALTSFGKGNKANLEKIIKNEEVEEINKPPKFDAKVEEKQIHIIGKTIKDGITEKPAGMRNDLIGAKQELEKMFFGKTFDDNIHIQLIYNIL

SEQ ID NO: 45 - protein, 84 aa, Artificial Sequence
  Gut_metagenome_contig11061000330
SQRDSTINPGEKQISVEKLNPKMVQYAKAVINHGTYCKDAVKALCVPFAYQLVRYKNLTIDGLFDKNHPGDKKEAKTLALDDDV

SEQ ID NO: 46 - protein, 418 aa, Artificial Sequence
  Gut_metagenome_contig338000322
FDNIISFIDILKKLNLEFKFKPEYADFFNMTNCRYTLEELRVINSIARMQKPSADARKIMYRDALRILGMDNRPDEEIDRELERTMPVGADGKFIKGKQGFRNFIASNVIESSRFHYLVRYNNPHKTRTLVKNPNVVKFVLEGIPETQIKRYFDVCKGQEIPPTSDKSAQIDVLARIISSVDYKIFEDVPQSAKINKDDPSRNFSDALKKQRYQAIVSLYLTVMYLITKNLVYVNSRYVIAFHCLERDAFLHGVTLPKMNKKIVYSQLTTHLLTDKNYTTYGHLKNQKGHRKWYVLVKNNLQNSDITAVSSFRNIVAHISVVRNSNEYISGIGELHSYFELYHYLVQSMIAKNNWYDTSHQPKTAEYLNNLKKHHTYCKDFVKAYCIPFGYVVPRYKNLTINELFDRNNPNPEPKEEV

SEQ ID NO: 47 - protein, 418 aa, Artificial Sequence; identical to SEQ ID NO: 46
  Artificial sequence

SEQ ID NO: 48 - protein, 109 aa, Artificial Sequence
  Gut_metagenome_contig9530000097
KSKHYRQCVKEDLLNARKLHTDDYNIDAIRAFRNAVAHLDVVRNMSAYIEGIREINSYYGLYHYLAQRCLQKRCNGALDDNTDYFRTLDKYNTYVKDFVKALCVPFAYN

SEQ ID NO: 49 - protein, 213 aa, Artificial Sequence
  Gut_metagenome_contig1750000258
STPDKARESLRDMLHNISFNDFADVKQDDRRATPEEKVEKERYKAIIGLYLTVMYHLVKNLVYVNSRYVMAFHCLERDAMHYDVCLDNYRDLIRHLISDGDSSCNHFISHNKRMRGCIEEDVNNSEQLIFGKEDAVIRFRNNVAHLSAIRNANEYIDDIREITSYFALYHYLMQRKLIDDCKVNDTAHKYFEKLTKYKTYVMDMVKALCSPFG

SEQ ID NO: 50 - protein, 131 aa, Artificial Sequence
  Gut_metagenome_contig5377000274
KENDILKKSRKKSSVKANGLKSVFVMENKALMTSFGKGNKANPEKELVGGEIRELTDSPVFDASNLGNIIEISRRGVRIEKKGYIASDYEIHKDVINAKDKLEERYFGSAMDDNIHIQMVYQILDIEKILS

SEQ ID NO: 51 - protein, 255 aa, Artificial Sequence
  gut_metagenome_P19E0k2120140920_c248000089
YSADMIDELAGIIHDMKFKQFENVDQSAKRGTPEAADKQQKQNVIRLYLTVCYLFFKNLIYVNSRYFLAFYCLERDVKLWGKTPKFGSREEDTSYTVLTREFMDSGKISTKSKSKNGAESPDEAAKHIPRNYIQKNLDNSDDVAIRYFRNAAEHINALQCAANYLENVEDTESYYRIYHYIMQRYIMQSYSQDKSGGKYDKADARDINDKTKEYFELVENHNTYCKDFVKALCVPFAYNLARFKNLSIDGLFDKN

SEQ ID NO: 52 - protein, 89 aa, Artificial Sequence
  Gut_metagenome_contig11400000031
NIVKHVLKDIPDTQIERYYKSYFNTENAANAEIMREKLASALMQVKYDEFKNVKQKVKNGTEEAFEKERKKALVRLYLTVVYIFVKNLV

SEQ ID NO: 53 - protein, 109 aa, Artificial Sequence
  Gut_metagenome_contig7940000191
NHIDHLNAVRNADKYLNDVRQVTSWYELFHYIVQRALFDDYLKALSYNPDAGKELNPRTLEYFAKVQKYGTCCKDFIKALNVPFAYNLPRYKNLSIDGLFDMNRPGEKG

SEQ ID NO: 54 - protein, 124 aa, Artificial Sequence
  Gut_metagenome_contig6049000251
LYLTSFGKGNAAVIEQKIEPENGYRVTGMQITPSITVNKATDESVRFRVKRKIAQKDEFIADNPMHEGRHRIEPSAGSDMLGLKTKLEKYYFGKEFDDNLHIQIIYNILDIEKILAVYSTNITA

SEQ ID NO: 55 - protein, 233 aa, Artificial Sequence
  Gut_metagenome_contig1137000500
MKKKKNLREQREAKKQERLAACSAKTKAAEIPAAEKPVATTPIAEPVKTDSKKKSSVKAAGLKSTLVLDNKLYTTSFGKGNEAVIEQEVNTADYTVANVNSTPSLEIRSAGDKELSFSSHRQFVNKDELSAVNPLYGGKDKPRKPAGKDMLGLKDKLEERYFGKSFNDNIHIQIIYNILDIEKILAVYATNITVALDHMIDKDVNIEKEDFIGYMNTLNTYEVFMDPSKNPKL

SEQ ID NO: 56 - protein, 69 aa, Artificial Sequence
  Gut_metagenome_contig9368000105
QRHVAEGVEPNRHDFAERFPYYAALYQYHSYVKDFVKALNAPFGYNIPRFKNLTIEELFDRNIHIETYV

SEQ ID NO: 57 - protein, 358 aa, Artificial Sequence
  Gut_metagenome_contig546000275
MDSYRPKLYKLIDFCIFKHYHEYTEISEKNVDTLRAAVSEEQKESFYADEAKRLWGIFDKQFLGFCKKINVWVNGSHEKEILGYIDKDAYRKKSDVSYFSKFLYAMSFFLDGKEINDLLTTLINKFDNIASFISTAKELDAEIDRILEKKLDPVTGKPLKGKNSFRNFIANNVIENKRFIYVIKFCNPKNVLKLVKNTKVTEFVLKRMPESQIDRYYSSCIDTEKNPSVDKKISDLAEMIKKIAFDDFRNVRQKTRTREESLEKERFKAVIGLYLTVVYLLIKNLVNVNSRYVMAFHCLERDAKLYGINIGKNYIELTEDLCRENENSRSAYLARNKRLRDCVKQNIDNAKNMKSKEK

SEQ ID NO: 58 - protein, 114 aa, Artificial Sequence
  Gut_metagenome_contig7216000573
KEMIYANEATFLWDKLGRTFLNFCDNIGAWVKNDHTEEIETYIDKDAYKTSSKVSYFSKLLYAMCFFLDGKEINDLLTTLINKFDNIGSFIETAKELGLSVTFIKDYAFFNASK

SEQ ID NO: 59 - protein, 136 aa, Artificial Sequence
  Gut_metagenome_contig4806000409
LIDSKRLRYFGFEYDPDGKNKNEEMKKRLYHLVAFAGQLRQWSFHSEGNFQLEWLYKLDDSRIAQEYRDTLDYFFDRRFDELNNNFVEQNATNLFILKETFPGEDLKAVTDLYYDFIIVKSQKNIGFSIKKLREKM

SEQ ID NO: 60 - protein, 94 aa, Artificial Sequence
  Gut_metagenome_contig10762000480
CFDTELNPMTEIKIQNLAQKMKDMDFTNFRDVQQKSRDPEKNREKERFKAIIGLYLTVVYRLVKNLADVNARYVMAFHSLERDSSLYNEPVVWK

SEQ ID NO: 61 - protein, 149 aa, Artificial Sequence
  Gut_metagenome_contig4114000374
DTKINPQTWLYQLENTPDLDNEYRDTLDHFFDERFNEINEHFVTQNATNLCIMKEVFPDEDFKSIADLYYDFIVVKSYKNIGFSIKKLREKMLELPEAKRVTSTEMDSVRSKLYKLIDFCIFKHYHEKPETVEMIVSMLRAYTSEDMKE

SEQ ID NO: 62 - protein, 933 aa, Artificial Sequence
  Ruminococcus_flavefaciens_FD1
MKKKMSLREKREAEKQAKKAAYSAASKNTDSKPAEKKAETPKPAEIISDNSRNKTAVKAAGLKSTIISGDKLYMTSFGKGNAAVIEQKIDINDYSFSAMKDTPSLEVDKAESKEISFSSHHPFVKNDKLTTYNPLYGGKDNPEKPVGRDMLGLKDKLEERYFGCTFNDNLHIQIIYNILDIEKILAVHSANITTALDHMVDEDDEKYLNSDYIGYMNTINTYDVFMDPSKNSSLSPKDRKNIDNSRAKFEKLLSTKRLGYFGFDYDANGKDKKKNEEIKKRLYHLTAFAGQLRQWSFHSAGNYPRTWLYKLDSLDKEYLDTLDHYFDKRFNDINDDFVTKNATNLYILKEVFPEANFKDIADLYYDFIVIKSHKNMGFSIKKLREKMLECDGADRIKEQDMDSVRSKLYKLIDFCIFKYYHEFPELSEKNVDILRAAVSDTKKDNLYSDEAARLWSIFKEKFLGFCDKIVVWVTGEHEKDITSVIDKDAYRNRSNVSYFSKLMYAMCFFLDGKEINDLLTTLINKFDNIANQIKTAKELGINTAFVKNYDFFNHSEKYVDELNIVKNIARMKKPSSNAKKAMYHDALTILGIPEDMDEKALDEELDLILEKKTDPVTGKPLKGKNPLRNFIANNVIENSRFIYLIKFCNPENVRKIVNNTKVTEFVLKRIPDAQIERYYKSCTDSEMNPPTEKKITELAGKLKDMNFGNFRNVRQSAKENMEKERFKAVIGLYLTVVYRVVKNLVDVNSRYIMAFHSLERDSQLYNVSVDNDYLALTDTLVKEGDNSRSRYLAGNKRLRDCVKQDIDNAKKWFVSDKYNSITKYRNNVAHLTAVRNCAEFIGDITKIDSYFALYHYLIQRQLAKGLDHERSGFDRNYPQYAPLFKWHTYVKDVVKALNAPFGYNIPRFKNLSIDALFDRNEIKKNDGEKKSDD

SEQ ID NO: 63 - protein, 70 aa, Artificial Sequence
  Gut_metagenome_contig7093000170
RQLAVGLDPKRSGFERNYPYFAKLFEWHTYVKDMVKALNAPFGYNIPRFKNLSIDDLFDMNEERVKDAKA

SEQ ID NO: 64 - protein, 91 aa, Artificial Sequence
  Gut_metagenome_contig11113000384
ASENERKAKQQAGQPAAKGNGEEKQKPILKLNPVRERKLSTTLKSRAKAAGLKSTFVINDKELLMTAFGRGNDAIPEKRILGAQVETLSEK

SEQ ID NO: 65 - protein, 119 aa, Artificial Sequence
  Gut_metagenome_contig6403000259
NKVKEFELDASVKYRLSKVVESVRLKDKATYFTKLIYLTTLFLDGKEINDLLTTLIHQFENIASFIDVMKDRGIADGFSGEYKFFESSKQVAFELRNVNSFARMTKASKDDDNAKQIMF

SEQ ID NO: 66 - protein, 123 aa, Artificial Sequence
  Gut_metagenome_contig6193000124
AEDYYDFLFKKTYKYLGFSIKTLREEFLTIKDAEKLKDKKYDSVRSKLYKVIDFLIFDLYQNRECLRINELVQRLRLSTDELTKAKIYADEAHFVYKKLWDIIDTEIVPQLDQKGIKALEEAY

SEQ ID NO: 67 - protein, 320 aa, Artificial Sequence
  Gut_metagenome_contig721000619
KEGSTMAKNEKKKSTAKALGLKSSFVVNNDIYMTSFGKGNKAVLEKKITENTIENKSDTTYFDVINRDPKGFTLEGRRIADMTAFSNDPKYHVNVVNGKFLEDQLGARSELEKKVFGRTFDDNVHIQLIHNILDIEKIMAQYVSDIVYLLHNTIKRDMNDDIMGYISIRNSFDDFCHPERIPDRKAKDNLQKQHDIFFDEILKCGRLAYFGNAFFEDGSDNKEIAKLKRYKEIYHIIALMGSLRQSYFHGENSDKNFQGPTWAYTLESNLTGKYKEFKDTLDKTFDERYEMISKDFGSTNMVNLQILEELLKMLYGNVSP

SEQ ID NO: 68 - protein, 220 aa, Artificial Sequence
  Gut_metagenome_contig1666000270
KELKFRINGKFIKNYHDRYDEDSANRRWKVVTKQNDVNLFCKLIYMMTLLLDGKEINDLLTTLVNKFDNIASFIDVMEDMGIEHRFIGGYDMFADSKKICVDLQMINSFARMQVTMKSAKKMLYRDALVILGMDQSEEEIERFMLENNIIKDNNEDKSEKKQHDFRNFLINSVINSSRFRYMVRYSSADGLRKLKKSRKLIGFVLNSLPETLIDRYYHSC

SEQ ID NO: 69 - protein, 204 aa, Artificial Sequence
  Gut_metagenome_contig2002000411
EKQNKAKYQAIISLYLMVMYQIVKNMIYVNSRYVIAFHCLERDSNQLLGRFNSRDASMYNKLTQKFITDKYLNDGAQGCSKKVGNYLSHNITCCSDELRKEYRNQVDHFAVVRMIGKYAADIGKFSTWFELYHYVMQRIIFDKRNPLSETERTYKQLIAKHHTYCKDLVKALNTPFGYNLARYKNLSIGELFDRNNYNAKTKET

SEQ ID NO: 70 - protein, 944 aa, Artificial Sequence
  Ruminococcus_albus
MAKKSKGMSLREKRELEKQKRIQKAAVNSVNDTPEKTEEANVVSVNVRTSAENKHSKKSAAKALGLKSGLVIGDELYLTSFGRGNEAKLEKKISGDTVEKLGIGAFEVAERDESTLTLESGRIKDKTARPKDPRHITVDTQGKFKEDMLGIRSVLEKKIFGKTFDDNIHVQLAYNILDVEKIMAQYVSDIVYMLHNTDKTERNDNLMGYMSIRNTYKTFCDTSNLPDDTKQKVENQKREFDKIIKSGRLGYFGEAFMVNSGNSTKLRPEKEIYHIFALMASLRQSYFHGYVKDTDYQGTTWAYTLEDKLKGPSHEFRETIDKIFDEGFSKISKDFGKMNKVNLQILEQMIGELYGSIERQNLTCDYYDFIQLKKHKYLGFSIKRLRETMLETTPAECYKAECYNSERQKLYKLIDFLIYDLYYNRKPARIEEIVDKLRESVNDEEKESIYSVEAKYVYESLSKVLDKSLKNSVSGETIKDLQKRYDDETANRIWDISQHSISGNVNCFCKLIYIMTLMLDGKEINDLLTTLVNKFDNIASFIDVMDELGLEHSFTDNYKMFADSKAICLDLQFINSFARMSKIDDEKSKRQLFRDALVILDIGNKDETWINNYLDSDIFKLDKEGNKLKGARHDFRNFIANNVIKSSRFKYLVKYSSADGMIKLKTNEKLIGFVLDKLPETQIDRYYESCGLDNAVVDKKVRIEKLSGLIRDMKFDDFSGVKTSNKAGDNDKQDKAKYQAIISLYLMVLYQIVKNMIYVNSRYVIAFHCLERDFGMYGKDFGKYYQGCRKLTDHFIEEKYMKEGKLGCNKKVGRYLKNNISCCTDGLINTYRNQVDHFAVVRKIGNYAAYIKSIGSWFELYHYVIQRIVFDEYRFALNNTESNYKNSIIKHHTYCKDMVKALNTPFGYDLPRYKNLSIGDLFDRNNYLNKTKESIDANSSIDSQ

SEQ ID NO: 71 - protein, 449 aa, Artificial Sequence
  Gut_metagenome_contig13552000311
LIDFLIYDLYYNRKPARIEEIVDKLRESVNDEEKESIYSAETKYVYEALGKVLVRSLKKYLNGATIRDLKNRYDAKTANRIWDISEHSKSGHVNCFCKLIYMMTLMLDGKEINDLLTTLVNKFDNIASFIDVMDELGLEHSFTDNYKMFADSKAICLDLQFINSFARMSKIDDEKSKRQLFRDALVVLDIGDKNEDWIEKYLTSDIFKRDENGNKIDGEKRDFRNFIANNVIKSARFKYLVKYSSADGMIKLKKNEKLISFVLEQLPETQIDRYYESCGLDCAVADRKVRIEKLTGLIRDMRFDNFRGVNYSNDACKKDKQAKAKYQAIISLYLMVLYQIVKNMIYVNSRYVIAFHCLERDLLFFNIELDNSYQYSNCNELTEKFIKDKYMKEGALGFNMKAGRYLTKNIGNCSNELRKIYRNQVDHFAVVRKIGNYAADIASVGSWFE

SEQ ID NO: 72 - protein, 96 aa, Artificial Sequence
  Gut_metagenome_contig10037000527
YMDQNFANSDAWAIHVYRNKIQHLDAVRHADMYIGDIREFHSWFELYHYIIQRRIIDQYAYESTPGSSRDGSAIIDEERLNPATRRYFRLITTYKT

SEQ ID NO: 73 - protein, 519 aa, Artificial Sequence
  Gut_metagenome_contig238000329
RYDKDRSKIYTMMDFVIYRYYIDNNNDSIDFINKLRSSIDEKSKEKLYNEEANRLWNKLKEYMLYIKEFNGKLASRTPDRDGNISEFVESLPKIHRLLPRGQKISNFSKLMYLLTMFLDGKEINDLLTTLINKFENIQGFLDIMPEINVNAKFEPEYVFFNKSHEIAGELKLIKGFAQMGEPAATLKLEMTADAIKILGTEKEDAELIKLAESLFKDENGKLLGNKQHGMRNFIGNNVIKSKRFHYLIRYGDPAHLHKIATNKNVVRFVLGRIADMQKKQGQKGKNQIDRYYEVCVGNKDIKKTIEEKIDALTDIIVNMNYDQFEKKKAVIENQNRGKTFEEKNKYKRDNAEREKFKKIISLYLTVIYHILKNIVNVNSRYILGFHCLERDKQLYIEKYNKDKLDGFVALTKFCLGDEERYEDLKAKAQASIQALETANPKLYAKYMNYSDEEKKEEFKKQLNRERVKNARNAYLKNIKNYIMIRLQLRDQTDSSGYLCGEFRDKVAHLEVARHAHEYI

SEQ ID NO: 74 - protein, 181 aa, Artificial Sequence
  Gut_metagenome_contig2643000492
NGEIVSLAEKEAFSAKIADKNIGCKIENKQFRHPKGYDVIADNPIYKGSPRQDMLGLKETLEKRYFSPSDSIDNVRVQVAHNILDIEKILAEYITNAVYSFDNIAGFGKDIIGDDFSPVYTYDKFEKSDRYEYFKNLLNNSRLGYYGQAFFECDDSKENKKKKDAIKCYNIIALLSGLRHW

SEQ ID NO: 75 - protein, 440 aa, Artificial Sequence
  Gut_metagenome_contig874000057
MSKNKESYAKGMGLKSALVSGSKVYMTSFEGGNDAKLEKVVENSEIVSLAEKESFSAEIFKKNIGCKIENKKFKHPKRYDVIADNPLYKGSVRQDMLGLKETLEKRYFNSADGTDNVCIQVIHNILDIEKILAEYITNAVYSFDNIAGFGEDIIGMGGFKPIYTYKQFKEPDKYNKKFDDILNNSRLGYYGKAFFEKNDLKHNPNKKKRDKNPYILKYDNECYYIIALLSGLRHWNIHSHAKDDLVSYRWLYNLDSILNREYISTLNYLYDDIADELTESFSKNSSANVNYIAETLNIDPSEFAQQYFRFSIMKEQKNMGFNVSKLREIMLDRKELSDIRDNHRVFDSIRSKLYTMMDFVIYRYYIEEAAKTEAENRNLPENEKKISEKDFFVINLRGSFDENQKEKLYIEEAKRLWEKLKDIMLKIKEFRGEKVKEYKK

SEQ ID NO: 76 - protein, 137 aa, Artificial Sequence
  Gut_metagenome_contig4781000489
LDKQLDYEYIRTLNYMFNDIADELTRTFSKNSAANVNYIAETLNIDPNKFAEQYFRFSIMKEQKNLGFNLTKLRESMLDRRELSDIRDNHNVFDSIRPKLYTMMDFVIYKHYIDEAKKTEAENKSLPDDRKNLSEKD

SEQ ID NO: 77 - protein, 87 aa, Artificial Sequence
  Gut_metagenome_contig12144000352
RMGEPVANTKRVMMIDAVKILGTDLSDDELKEMADSFFKDSDGNLLKKGKHGMRNFITNNVIKNKRFHYLIRYGDPAHLHEIAKNEA

SEQ ID NO: 78 - protein, 414 aa, Artificial Sequence
  Gut_metagenome_contig5590000448
VHNNEEKDLIKYTWLYNLDKYLDAEYITTLNYMYNDIGDELTDSFSKNSAANINYIAETLGIDPKTFAEQYFRFSIMKEQKNLGFNLTKLREVMLDRKDMSEIRENHNDFDSIRAKVYTMMDFVIYRYYIEEAAKVNAANKSLPDNEKSLSEKDIFVISLRGSFNEDQKDRLYYDEAQRLWSKVGKLMLKIKKFRGKDTRKYKNMGTPRIRRLIPEGRDISTFSKLMYALTMFLDGKEINDLLTTLINKFDNIQSFLKVMPLIGVNAKFAEEYSFFNNSEKIADELRLIKSFARMGEPVADARRAMYIDAIRILGTDLSDDELKALADSFSLDENGNKLGKGKHGMRNFIINNVITNKRFHYLIRYGNPVHLHEIAKNEAVVKFVLGRIADIQKKQGQNGKNQIDRYYETCIGK

SEQ ID NO: 79 - protein, 109 aa, Artificial Sequence
  Gut_metagenome_contig9269000031
LSEKDIFVISLRGSFNEDQKDRLYYDEAQRLWSKLGKLMLKIKEFKGKDTKKYRDMGKPRLRRILPEGRDISTFSKLMYALTMFLDGKEINDLLTTLINKFDNIQSFLK

SEQ ID NO: 80 - protein, 105 aa, Artificial Sequence
  Gut_metagenome_contig8537000520
SARLADELRIVKSVSRMEMPMPAAKTLMFEDALKLFWIDSPEEAKKIISGDNKKIRNFIANNVVESSWFNYIVRYTDLKNARDFIRCRPIVEFVLNKVPETQIDR

SEQ ID NO: 81 - protein, 211 aa, Artificial Sequence
  Gut_metagenome_contig1845000130
SSLNEVEKDAIYAEEAKQAWVNIRDLVIRHILPMMKGDYIAQISVEDEKIDQSILEDVFISKITPSALAEFIYIVTLFIDGKEINDLLTQMIHKFDSIAAFQEVMRQRCMVTQFNQDYAIFEQSGKIAEDLRVVNSFARMSISKDGPNVKGAMFREALLILGLASPDETMESVLQKYMNSNLDRERKSVRNFVINNVIQSRRFHYLVRYGN

SEQ ID NO: 82 - protein, 906 aa, Artificial Sequence
  gut_metagenome_P13E0k2120140920_c3000072
MEREVKKPPKKSLAKAAGLKSTFVISPQEKELAMTAFGRGNDALLQKRIVDGVVRDVAGEKQQFQVQRQDESRFRLQNSRLADRTVTADDPLHRAETPRRQPLGAGMDQLRRKAILEQKYFGRTFDDNIHIQLIYNILDIHKMLAVPANHIVHTLNLLGGYGETDFVGMLPAGLPYDKLRVVKKKNGDTVDIKADIAAYAKRPQLAYLGAAFYDVTPGKSKRDAARGRVKREQDVYTILSLMSLLRQFCAHDSVRIWGQNTPAALYGLQALPQDMKDLLDDGWRRALGGVNDHFLDTNKVNLLTLFEYYGAETKQERVALTQDFYRFVVLKEQKNMGFSLRRLREELLKLPDAAYLTGQEYDSVRQKLYMLLDFLLCRLYAQERADRCEELVSALRCALSDEEKDAVYQAEAAALWQALGDTLRRELLPLLKGKKLQDKDKKKLDELGLSRDVLDGVLFRPAQQGSRANADYFCRLMHLSTWFMDGKEINTLLTTLISKLENIDSLRSVLESMGLAYSFVPAYAMFDHSRYIAGQLRVVNNIARMRKPAIGAKREMYRAAVVLLGVDSPEAAAAITDDLLQIDPETGKVRPRGDSARDTGLRNFVANNVVESRRFTYLLRYMTPEQARVLAQNEKLIAFVLSTVPSAQLERYCRTCGREDITGRPAQIRYLTAQIMGVRYESFTDVEQRGRGDNPKKERYKALIGLYLTVLYLAVKNMVNCNARYVIAFYCRDRDTALYQKEVCWYDLEEDKKSGKQRQVEDYTALTRYFVSQGYLNRHACGYLRSNMNGISNGLLAAYRNAVDHLNVIPPLGSLCRDIGRVDSYFALYHYAVQQYLNGRYYRKTPREQELFAAMAQHRTWCSDLVKALNTPFGYNLARYKNLSIDGLFDREGDHVVREDGEKPAE

SEQ ID NO: 83 - protein, 906 aa, Artificial Sequence
  gut_metagenome_P1E0k2120140920_c1000078
MEREVKKPPKKSLAKAAGLKSTFVISPQEKELAMTAFGRGNDALLQKRIVDGVVRDVAGEKQQFQVQRQDESRFRLQNSRLADRTVTADDPLHRAETPRRQPLGAGMDQLRRKAILEQKYFGRTFDDNIHIQLIYNILDIHKMLAVPANHIVHTLNLLGGYGETDFVGMLPAGLPYDKLRVVKKKNGDTVDIKADIAAYAKRPQLAYLGAAFYDVTPGKSKRDAARGRVKREQDVYAILSLMSLLRQFCAHDSVRIWGQNTTAALYHLQALPQDMKDLLDDGWRRALGGVNDHFLDTNKVNLLTLFEYYGAETKQARVALTQDFYRFVVLKEQKNMGFSLRRLREELLKLPDAAYLTGQEYDSVRQKLYMLLDFLLCRLYAQERADRCEELVSALRCALSDEEKDTVYQAEAAALWQALGDTLRRKLLPLLKGKKLQDKDKKKSDELGLSRDVLDGVLFRPAQQGSRANADYFCRLMHLSTWFMDGKEINTLLTTLISKLENIDSLRSVLESMGLAYSFVPAYAMFDHSRYIAGQLRVVNNIARMRKPAIGAKREMYRAAVVLLGVDSPEAAAAITDDLLQIDPETGKVRPRSDSARDTGLRNFIANNVVESRRFTYLLRYMTPEQARVLAQNEKLIAFVLSTVPDTQLERYCRTCGREDITGRPAQIRYLTAQIMGVRYESFTDVEQRGRGDNPKKERYKALIGLYLTVLYLAVKNMVNCNARYVIAFYCRDRDTALYQKEVCWYDLEEDKKSGKQRQVEDYTALTRYFVSQGYLNRHACGYLRSNMNGISNSLLTAYRNAVDHLNAIPPLGSLCRDIGRVDSYFALYHYAVQQYLNGRYYRKTPREQELFAAMAQHRTWCSDLVKALNTPFGYNLARYKNLSIDGLFDREGDHVVREDGEKPAE

SEQ ID NO: 84 - protein, 84 aa, Artificial Sequence
  Gut_metagenome_contig12990000099
INDLLTTLIHKFENIAAFLHVIQAEKLPVEFVPEFQVFSDSQKIAEELRIINSFARMNKPSANAREIMYIEAFKVLGMSGDEKQ

SEQ ID NO: 85 - protein, 345 aa, Artificial Sequence
  Gut_metagenome_contig525000349
MSKKENRKSYVKGLGLKSTLVSDSKVYLTTFADGSNAKLEKCVENNKIICISNDKEAFAASIANKNVGYKIKNDEKFRHPKGYDIISNNPLLHNNSVQQDMLGLKNVLEKRYFGKSSGGDNNLCIQIIHNIIDIEKILSEYIPNVVYAFNNIAGFKDEHNNIIDIIGTQTYNSSYTYADFSKDKSDKKYIEFQKLLKNKRLGYWGKAFFTGQGNNAKVRQENQCFHIIALLISLRNWATHSNELDKHTKRTWLYKLDDTNILNAEYVKTLNYLYDTIADELTKSFSKNGAVNVNYLAKKYNIKDDLPGFSEQYFRFSIMKEQKNLGFNISKLRENMLDFKDMSVI

SEQ ID NO: 86 - protein, 206 aa, Artificial Sequence
  Gut_metagenome_contig7229000302
KKISSLTKFCLGESDEKKLKALAKKSLEELKTTNSKLYENYIKYSDERKAEEAKRQINRERAKTAMNAHLRNTKWNDIMYGQLKDLADSKSRICSEFRNKAAHLEVARYAHMYINDISEVKSYFRLYHYIMQRRIIDVIENNPKAKYEGKVKVYFEDVKKNKKYNKNLLKLMCVPFGYCIPRFKNLSIEQMFDMNETDNSDKKKEK

SEQ ID NO: 87 - protein, 95 aa, Artificial Sequence
  Gut_metagenome_contig3227000343
IGDISEVNSYFQLYHYIMQRILIDKIGSKTTGKAKEYFDSVIVNKKYDDRLLKLLCSPLGYCLTRYKDLSIEALFDMNEAAKYDKLNKERKNKKK

SEQ ID NO: 88 - protein, 115 aa, Artificial Sequence
  Gut_metagenome_contig7030000469
SIRSKLYTMMDFVIYRYYIEESAKAAAENKPSESDSFVIRLRGSFNENQKEELYIEEAERLWKKFGEIMLKIKEFRGEKVKEYKKEVPRIERILPHGKDISAFSKLMYMLSMFLD

SEQ ID NO: 89 - protein, 110 aa, Artificial Sequence
  Gut_metagenome_contig5149000068
FRNKVAHLEAVRYAHLYINDIAEVNSYFQLYHYIIQRRIMAECYDKSSGKVREYFNAVNKEKKYNDRLLKLLCVPFGYCVTRFKDLSIEALFDKNEADRFDKEKKKAEKK

SEQ ID NO: 90 - protein, 84 aa, Artificial Sequence
  Gut_metagenome_contig400200045
MIEKKKSYAKGMGLKSTIVSGSKVYMTTFGDGSEARLEKVVENDSIKTLHEGEAFSAEMTDNNAGYKIGNVKFSHPNGYDVVAN

SEQ ID NO: 91 - protein, 94 aa, Artificial Sequence
  Gut_metagenome_contig10420000446
SSKSVAEKVNALTKIITGMNYDQFDSRRNVIENTGAGNAEREKYKKIISLYLTVIYHILKNIVNINSRYVIGFHCVERDAQLYKEKGYDINLKK

SEQ ID NO: 92 - protein, 967 aa, Artificial Sequence
  new_flavefaciens,_strain_XPD3002
MIEKKKSFAKGMGVKSTLVSGSKVYMTTFAEGSDARLEKIVEGDSIRSVNEGEAFSAEMADKNAGYKIGNAKFSHPKGYAVVANNPLYTGPVQQDMLGLKETLEKRYFGESADGNDNICIQVIHNILDIEKILAEYITNAAYAVNNISGLDKDIIGFGKFSTVYTYDEFKDPEHHRAAFNNNDKLINAIKAQYDEFDNFLDNPRLGYFGQAFFSKEGRNYIINYGNECYDILALLSGLRHWVVHNNEEESRISRTWLYNLDKNLDNEYISTLNYLYDRITNELTNSFSKNSAANVNYIAETLGINPAEFAEQYFRFSIMKEQKNLGFNITKLREVMLDRKDMSEIRKNHKVFDSIRTKVYTMMDFVIYRYYIEEDAKVAAANKSLPDNEKSLSEKDIFVINLRGSFNDDQKDALYYDEANRIWRKLENIMHNIKEFRGNKTREYKKKDAPRLPRILPAGRDVSAFSKLMYALTMFLDGKEINDLLTTLINKFDNIQSFLKVMPLIGVNAKFVEEYAFFKDSAKIADELRLIKSFARMGEPIADARRAMYIDAIRILGTNLSYDELKALADTFSLDENGNKLKKGKHGMRNFIINNVISNKRFHYLIRYGDPAHLHEIAKNEAVVKFVLGRIADIQKKQGQNGKNQIDRYYETCIGKDKGKSVSEKVDALTKIITGMNYDQFDKKRSVIEDTGRENAEREKFKKIISLYLTVIYHILKNIVNINARYVIGFHCVERDAQLYKEKGYDINLKKLEEKGFSSVTKLCAGIDETAPDKRKDVEKEMAERAKESIDSLESANPKLYANYIKYSDEKKAEEFTRQINREKAKTALNAYLRNTKWNVIIREDLLRIDNKTCTLFRNKAVHLEVARYVHAYINDIAEVNSYFQLYHYIMQRIIMNERYEKSSGKVSEYFDAVNDEKKYNDRLLKLLCVPFGYCIPRFKNLSIEALFDRNEAAKFDKEKKKVSGNS

SEQ ID NO: 93 - protein, 146 aa, Artificial Sequence
  M26_Gut_metagenome_contig698000307
MIEKKKSFAKGMGVKSTLVSGSKVYMTTFAEGSDAKLEKIVEGDSIRSVNEGEAFSAEMADKNAGYKIGNAKFSHPKGYAVVANNPLYTGPVQQDMLGLKETLEKRYFGESADGNDNICIQVIHNILDIEKILAEYITNAAYSVTD

SEQ ID NO: 94 - protein, 724 aa, Artificial Sequence
  M36_Uncultured_Eubacterium_sp_TS28_c40956
RIRFVLSGIFVNAFSSKHGFESGVEINTSNPTHRSGESSPVRGDMLGLKSELEKRFFGKTFDDNIHIQLIYNILDIEKILAVYVTNIVYALNNMLGVKGSESHDDFIGYLSTNNTYDVFIDPDNSSLSDDKKANVRKSLSKFNVLLKTKRLGYFGLEEPKTKDNRVSEAYKKRVYHMLAIVGQIRQCVFHDKSGAKRFDLYSFINNIDPEYRDTLDYLVEERLKSINKDFIQGNKVNISLLIDMMKGYEADDIIRLYYDFIVLKSQKNLGFSIKKLREKMLEEYGFRFKDKQYDSVRSKMYKLMDFLLFCNYYRNDIAAGEALVRKLRFSMTDDEKEGLYADEAAKLWGKFRNDFENIADHMNGDVIKELGKADMDFDEKILDSEKKNASDLLYFSKMIYMLTYFLDGKEINDLLTTLISKFDNIKEFLKIMKSSAVNVECELTAGYKLFNDSQRITNELFIVKNIASMRKPAASAKLTMFRDALTILGIDDKITDDRISEILKLKEKGKGIHGLRNFITNNVIESSRFVYLIKYANAQKIRKVAENEKVVMFVLGGIPDTQIERYYKSCVEFPDMNSSLEVKRSELARMIKNISFDDFKNVKQQAKGQRKRRLRRGQKAVIGLYLTVMYLLVKNLVNVNARYVIAIHCLERDFGLYKEIIPELASKNLKNDYRILSQTLCELCDKSPNLFLKKNERLRKCVEVDINNADSSMTRKYRNCIAHL

SEQ ID NO: 95 - protein, 219 aa, Artificial Sequence
  M12_gut_metagenome_P25C0k2120140920_c134000066
MAKKNKMKPRELREAQKKARQFKAAEINNNAAPAIAAMPAAEVIAPVAEKKKSSVKAAGMKSILVSENKMYITSFGKGNSAVLEYEVDNNDYNKTQLSSKDNSNIELCGVNEVNITFSSKHGFESGVEINTSNPTHRSGESSPVRWDMLGLKSELEKRFFGKTFDDNIHIQLIYNILDIEKILAVYVTNIVYALNNMLGVKGSESHDDFIGYLSTNNIY

SEQ ID NO: 96 - protein, 915 aa, Artificial Sequence
  Artificial sequence
MAKKNKMKPRELREAQKKARQFKAAEINNNAAPAIAAMPAAEVIAPVAEKKKSSVKAAGMKSILVSENKMYITSFGKGNSAVLEYEVDNNDYNKTQLSSKDNSNIELCGVNEVNITFSSKHGFESGVEINTSNPTHRSGESSPVRWDMLGLKSELEKRFFGKTFDDNIHIQLIYNILDIEKILAVYVTNIVYALNNMLGVKGSESHDDFIGYLSTNNIYDVFIDPDNSSLSDDKKANVRKSLSKFNVLLKTKRLGYFGLEEPKTKDTRVSQAYKKRVYHMLAIVGQIRQCVFHDKSGAKRFDLYSFINNIDPEYRETLDYLVDERFDSINKGFIQGNKVNISLLIDMMKGYEADDIIRLYYDFIVLKSQKNLGFSIKKLREKMLEEYGYRFKDKQMYKLMDFLLFCNYYRNDVVAGEALVRKLRFSMTDDEKEGIYADEASKLWGKFRNDFENIADHMNGDVIKELGKADMDFDEKILDSEKKNASDLLYFSKMIYMLTYFLDGKEINDLLTTLISKFDNIKEFLKIMKSSAVDVECELTAGYKLFNDSQRITNELFIVKNIASMRKPASSAKLTMFRDALTILGIDDNITDDRISEILKLKEKGKGIHGLRNFITNNVIESSRFVYLIKYANAQKIREVAKNEKVVMFVLGGIPDTQIERYYKSCVEFPDMNSSLEVKRSELARMIKNISFDDFKNVKQQAKGRENVAKERAKAVIGLYLTVMYLLVKNLVNVNARYVIAIHCLERDFGLYKEIIPELASKNLKNDYRILSQTLCELCDNGDESPNLFLKKNKRLRKCVEVDINNADSNMTRKYRNCIAHLTVVRELKEYIGDIRTVDSYFSIYHYVMQRCITKREDDTKQEEKIKYEDDLLKNHGYTKDFVKALNSPFGYNIPRFKNLSIEQLFDRNEYLTEK

SEQ ID NO: 97 - protein, 922 aa, Artificial Sequence
  M10_gut_metagenome_P25C90k2120140920,_c28000041
MAKKNKMKPRELREAQKKARQFKAAEINNNAAPAIAAMPAAEVIAPVAEKKKSSVKAAGMKSILVSENKMYITSFGKGNSAVLEYEVDNNDYNKTQLSSKDNSNIELCGVNEVNITFSSKHGFESGVEINTSNPTHRSGESSPVRWDMLGLKSELEKRFFGKTFDDNIHIQLIYNILDIEKILAVYVTNIVYALNNMLGVKGSESHDDFIGYLSTNNIYDVFIDPDNSSLSDDKKANVRKSLSKFNVLLKTKRLGYFGLEEPKTKDTRVSQAYKKRVYHMLAIVGQIRQCVFHDKSGAKRFDLYSFINNIDPEYRETLDYLVDERFDSINKGFIQGNKVNISLLIDMMKGYEADDIIRLYYDFIVLKSQKNLGFSIKKLREKMLEEYGYRFKDKQYDSVRSKMYKLMDFLLFCNYYRNDVVAGEALVRKLRFSMTDDEKEGIYADEASKLWGKFRNDFENIADHMNGDVIKELGKADMDFDEKILDSEKKNASDLLYFSKMIYMLTYFLDGKEINDLLTTLISKFDNIKEFLKIMKSSAVDVECELTAGYKLFNDSQRITNELFIVKNIASMRKPASSAKLTMFRDALTILGIDDNITDDRISEILKLKEKGKGIHGLRNFITNNVIESSRFVYLIKYANAQKIREVAKNEKVVMFVLGGIPDTQIERYYKSCVEFPDMNSSLEVKRSELARMIKNISFDDFKNVKQQAKGRENVAKERAKAVIGLYLTVMYLLVKNLVNVNARYVIAIHCLERDFGLYKEIIPELASKNLKNDYRILSQTLCELCDNGDESPNLFLKKNKRLRKCVEVDINNADSNMTRKYRNCIAHLTVVRELKEYIGDIRTVDSYFSIYHYVMQRCITKREDDTKQEEKIKYEDDLLKNHGYTKDFVKALNSPFGYNIPRFKNLSIEQLFDRNEYLTEK

SEQ ID NO: 98 - protein, 922 aa, Artificial Sequence; identical to SEQ ID NO: 97
  M11_gut_metagenome_P25C7k2120140920_c4078000105

SEQ ID NO: 99 - protein, 636 aa, Artificial Sequence
  gut_metagenome_P25C0k2120140920_c32000045
IRQCVFHDKSGAKRFDLYSFINNIDPEYRETLDYLVDERFDSINKGFIQGNKVNISLLIDMMKGYEADDIIRLYYDFIVLKSQKNLGFSIKKLREKMLEEYGYRFKDKQYDSVRSKMYKLMDFLLFCNYYRNDVVAGEALVRKLRFSMTDDEKEGIYADEASKLWGKFRNDFENIADHMNGDVIKELGKADMDFDEKILDSEKKNASDLLYFSKMIYMLTYFLDGKEINDLLTTLISKFDNIKEFLKIMKSSAVDVECELTAGYKLFNDSQRITNELFIVKNIASMRKPASSAKLTMFRDALTILGIDDNITDDRISEILKLKEKGKGIHGLRNFITNNVIESSRFVYLIKYANAQKIREVAKNEKVVMFVLGGIPDTQIERYYKSCVEFPDMNSSLEVKRSELARMIKNISFDDFKNVKQQAKGRENVAKERAKAVIGLYLTVMYLLVKNLVNVNARYVIAIHCLERDFGLYKEIIPELASKNLKNDYRILSQTLCELCDNGDESPNLFLKKNKRLRKCVEVDINNADSNMTRKYRNCIAHLTVVRELKEYIGDIRTVDSYFSIYHYVMQRCITKREDDTKQEEKIKYEDDLLKNHGYTKDFVKALNSPFGYNIPRFKNLSIEQLFDRNEYLTEK

SEQ ID NO: 100 - protein, 929 aa, Artificial Sequence
  M13_gut_metagenome_P23C7k2120140920_c3000067
MAKKNKMKPRELREAQKKARQLKAAEINNNAAPAIAAMPAAQVIAPAAEKKKSSVKAAGMKSILVSENKMYITSFGKGNSAVLEYEVDKVDNNNYNKTQLSSKDNSNIELGDVNEVNITFSSKHGFESGVEINTSNPTHRSGESSPVRWDMLGLKSELEKRFFGKTFDDNIHIQLIYNILDIEKILAVYVTNIVYALNNMLGIKGSESYDDFMGYLSARNTYEVFTHPDKSNLSDKVKGNIKKSFSTFNDLLKTKRLGYFGLEEPKTKDTRVSEAYKKRVYHMLAIVGQIRQCVFHDLSEHSEYDLYSFIDNSKKVYRECRETLNYLVDERFDSINKGFIQGNKVNISLLIDMMKDDYEADDIIHLYYDFIVLKSQKNLGFSIKKLREKMLDEYGFRFKDKQYDSVRSKMYKLMDFLLFCNYYRNDVVAGEALVRKLRFSMTDDEKEGIYADEAEKLWGKFRNDFENIADHMNGDVIKELGKADMDFDEKILDSEKKNASDLLYFSKMIYMLTYFLDGKEINDLLTTLISKFDNIKEFLKIMKSSAVDVECELTAGYKLFNDSQRITNELFIVKNIASMRKPAASAKLTMFRDALTILGIDDKITDDRISEILKLKEKGKGIHGLRNFITNNVIESSRFVYLIKYANAQKIREVAKNEKVVMFVLGGIPDTQIERYYKSCVEFPDMNSSLKVKRSELARMIKNIRFDDFKNVKQQAKGRENVAKERAKAVIGLYLTVMYLLVKNLVNVNARYVIAIHCLERDFGLYKEIIPELASKNLKNDYRILSQTLCELCDDRDESPNLFLKKNRRLRKCVEVDINNADSSMTRKYRNCIAHLTVVRELKEYIGDIRTVDSYFSIYHYVMQRCITKREDDTKQEEKIKYEDDLLKNHGYTKDFVKALNSPFGYNIPRFKNLSIEQLFDRNEYLTEK

SEQ ID NO: 101 - protein, 923 aa, Artificial Sequence
  M5_gut_metagenome_P18E90k2120140920
MAKKNKMKPRELREAQKKARQLKAAEINNNAVPAIAAMPAAEVIAPAAEKKKSSVKAAGMKSILVSENKMYITSFGKGNSAVLEYEVDKVDDNDYNKTQLSSKDNSNIELGNVNEVNITFSSRRGFESGVEINTSNPTHRSGESSSVRGDMLGLKSELEKRFFGKTFDDNIHIQLIYNILDIEKILAVYVTNIVYALNNMLGVKGSESYDDFMGYLSAQNTYYIFTHPDKSNLSDKVKGNIKKSLSKFNDLLKTKRLGYFGLEEPKTKDKRVSEAYKKRVYHMLAIVGQIRQSVFHDKSNELDEYLYSFIDIIDSEYRDTLDYLVDERFDSINKGFIQGNKVNISLLIDMMKDDYEADDIIRLYYDFIVLKSQKNLGFSIKKLREKMLEEYGFRFKDKQYDSVRSKMYKIMDFLLFCNYYRNDVVAGEALVRKLRFSMTDDEKEGIYADEAAKLWGKFRNDFENIADHMNGDVIKELGKADMDFDEKILDSEKKNASDLLYFSKMIYMLTYFLDGKEINDLLTTLISKFDNIKEFLKIMKSSAVDVECELTAGYKLFNDSQRITNELFIVKNIASMRKPAASAKLTMFRDALTILGIDDNITDDRISEILKLKEKGKGIHGLRNFITNNVIESSRFVYLIKYANAQKIREVAKNEKVVMFVLGGIPDTQIERYYKSCVEFPDMNSSLEVKRSELARMIKNICFDDFKNVKQQAKGRENVAKERAKAVIGLYLTVMYLLVKNLVNVNARYVIAIHCLERDFGLYKEIVSELASKNLKNDYRILSQTLCELCDKSPNLFLKKNERLRKCVEVDINNADSSMTRKYRNCIAHLTVVRELKEYIGDIRAVDSYFSIYHYVMQRCITKRGNDTKQEDKIKYEDDLLKNHGYTKDFVKALNSPFGYNIPRFKNLSIEQLFDRNEYLTEK

SEQ ID NO: 102 - protein, 923 aa, Artificial Sequence; identical to SEQ ID NO: 101
  M21_gut_metagenome_P18E0k2120140920

SEQ ID NO: 103 - protein, 926 aa, Artificial Sequence
  M7_gut_metagenome_P38C7k2120140920_c4841000003
  misc_feature (551)..(551): Xaa can be any naturally occurring amino acid
MAKKNKMKPRELREAQKKARQLKAAEINNNAAPAIAAMPAAEAIAPAAEKKKSSVKAAGMKSIFVSENKMYITSFGKGNSAVLEYEVDKVDNNVYNQTQLSSEDSSNIELCGVTKVNITFSSKHGLESGVEISTSNPTHRSGESSPVRWDMLGLKSELEKRFFGKTFDDNIHIQLIYNILDIEKILAVYVTNIVYALNNMLGIKDSESYDDFMGYLSARNTYKVFTHPDKSNLSDKVKGNIKKSFSTFNDLLKTKRLGYFGLEEPKTKDTRVSEAYKKRVYHMLAIVGQIRQCVFHDLSEHSEYDLYSFIDNSKKVYRECRETLNYLVDERFDSINKGFIQGNKVNISLLIDMMKDDYEADDIIHLYYDFIVLKSQKNLGFSIKKLREKMLDEYGFRFKDKQYDSVRSKMYKLMDFLLFCNYYRNDVVAGEALVRKLRFSMTDDEKEGIYADEAEKLWGKFRNDFENIADHMNGDVIKELGKADMDFDEKIIDSEKKNASDLLYFSKMIYMLTYFLDGKEINDLLTTLISKFDNIKEFLKIMKSSAVDVEXELTAGYKLFNDSQRITNELFIVKNIASMRKPAASAKLTMFRDALTILGIDDNITDDRISEILKLKEKGKGIHGLRNFITNNVIESSRFVYLIKYANAQKIREVAKNEKVVMFVLGGIPDTQIERYYKSCVEFPDMNSSLGVKRSELARMIKNISFDDFKNVKQQAKGRENVAKERAKAVIGLYLTVMYLLVKNLVNVNARYVIAIHCLERDFGLYKEIIPELASKNLKNDYRILSQTLCELCDKSPNLFLKKNERLRKCVEVDINNADSSMTRKYRNCIAHLTVVRELKEYIGDICTVDSYFSIYHYVMQRCITKRENDTKQEEKIKYEDDLLKNHGYTKDFVKALNSPFGYNIPRFKNLSIEQLFDRNEYLTEK

SEQ ID NO: 104 - protein, 918 aa, Artificial Sequence
  Ruminococcus_bicirculans
MAKKNKMKPRELREAQKKARQLKAAEINNNAVPAIAAMPAAEAAAPAAEKKKSSVKAAGMKSILVSENKMYITSFGKGNSAVLEYEVDNNDYNKTQLSSKDNSNIELCDVGKVNITFSSRRGFESGVEINTSNPTHRSGESSSVRGDMLGLKSELEKRFFGKNFDDNIHIQLIYNILDIEKILAVYVTNIVYALNNMLGEGDESNYDFMGYLSTFNTYKVFTNPNGSTLSDDKKENIRKSLSKFNALLKTKRLGYFGLEEPKTKDTRASEAYKKRVYHMLAIVGQIRQCVFHDKSGAKRFDLYSFINNIDPEYRETLDYLVDERFDSINKGFIQGNKVNISLLIDMMKGYEADDIIRLYYDFIVLKSQKNLGFSIKKLREKMLDEYGFRFKDKQYDSVRSKMYKLMDFLLFCNYYRNDIAAGESLVRKLRFSMTDDEKEGIYADEAAKLWGKFRNDFENIADHMNGDVIKELGKADMDFDEKILDSEKKNASDLLYFSKMIYMLTYFLDGKEINDLLTTLISKFDNIKEFLKIMKSSAVDVECELTAGYKLFNDSQRITNELFIVKNIASMRKPAASAKLTMFRDALTILGIDDKITDDRISEILKLKEKGKGIHGLRNFITNNVIESSRFVYLIKYANAQKIREVAKNEKVVMFVLGGIPDTQIERYYKSCVEFPDMNSSLGVKRSELARMIKNISFDDFKNVKQQAKGRENVAKERAKAVIGLYLTVMYLLVKNLVNVNARYVIAIHCLERDFGLYKEIIPELASKNLKNDYRILSQTLCELCDKSPNLFLKKNERLRKCVEVDINNADSSMTRKYRNCIAHLTVVRELKEYIGDICTVDSYFSIYHYVMQRCITKRENDTKQEEKIKYEDDLLKNHGYTKDFVKALNSPFGYNIPRFKNLSIEQLFDRNEYLTEK

SEQ ID NO: 105 - protein, 920 aa, Artificial Sequence
  our_cloned_CAG_Ncas1
MAKKNKMKPRELREAQKKARQLKAAEINNNAAPAIAAMPAAEAAAPAAEKKKSSVKAAGMKSILVSENKMYITSFGKGNSAVLEYEVDNNDYNQTQLSSKGSSNIELHGVNEVNITFSSKHGFESGVEINTSNPTHRSGESSPVRWDMLGLKSELEKRFFGKTFDDNIHIQLIYNILDIEKILAVYVTNIVYALNNMLGVKGSESHDDFIGYLSTNNTYDVFIDPDNSSLSDDKKANVRKSLSKFNVLLKTKRLGYFGLEEPKTKDTRVSQAYKKRVYLAIVGQIRQCVFHDKSGAKRFDLYSFINNIDPEYRETLDYLVDERFDSINKGFIEGNKINISLLIDMMKGYEADDIIRLYYDFIVLKSQKNLGFSIKKLREKMLDEYGFRFKDKQYDPVRSKMYKLMDFLLFCNHYRNDVAAGEALVRKLRFSMTDDEKEGIYADEAAKLWGKFRNDFENIADHMNGDVIKELGKADMDFDEKILDSEKKNASDLLYFSKMIYMLTYFLDGKEINDLLTTLISKFDNIKEFLKIMKSSAVDVECELTAGYKLFNDSQRITNELFIVKNIASMRKPAASAKLTMFRDALTILGIDDNITDDRISEILKLKEKGKGIHGLRNFITNNVIESSRFVYLIKYANAQKIREVAKNEKVVMFVLGGIPDTHIERYYKSCVEFPDMNSSLEAKRSELARMIKNISFDDFKNVKQQAKGRENVAKERAKAVIGLYLTVMYLLVKNLVNVNARYVIAIHCLERDFGLYKEIIPELASKNLKNDYRILSQTLCELCDDRDESPNLFLKKNKRLRKCVEVDINNADSSMTRKYRNCIAHLTVVRELKEYIGDIRTVDSYFSIYHYVMQRCITKRENDTKQEEKIKYEDDLLKNHGYTKDFVKALNSPFGYNIPRFKNLSIEQLFDRNEYLTEK

SEQ ID NO: 106 - protein, 922 aa, Artificial Sequence
  consensus_1
  misc_feature (89)..(89): Xaa can be any naturally occurring amino acid
  misc_feature (386)..(386): Xaa can be any naturally occurring amino acid
  misc_feature (789)..(790): Xaa can be any naturally occurring amino acid
MAKKNKMKPRELREAQKKARQLKAAEINNNAAPAIAAMPAAEVIAPAAEKKKSSVKAAGMKSILVSENKMYITSFGKGNSAVLEYEVDXNNDYNKTQLSSKDNSNIELGDVNEVNITFSSKHGFESGVEINTSNPTHRSGESSPVRWDMLGLKSELEKRFFGKTFDDNIHIQLIYNILDIEKILAVYVTNIVYALNNMLGIKGSESYDDFMGYLSARNTYDVFTHPDKSNLSDKVKGNIKKSLSKFNDLLKTKRLGYFGLEEPKTKDTRVSEAYKKRVYHMLAIVGQIRQCVFHDKSGAKRFDLYSFIDNIDPEYRDTLDYLVDERFDSINKGFIQGNKVNISLLIDMMKGYEADDIIRLYYDFIVLKSQKNLGFSIKKLREKMLXEYGFRFKDKQYDSVRSKMYKLMDFLLFCNYYRNDVVAGEALVRKLRFSMTDDEKEGIYADEAAKLWGKFRNDFENIADHMNGDVIKELGKADMDFDEKILDSEKKNASDLLYFSKMIYMLTYFLDGKEINDLLTTLISKFDNIKEFLKIMKSSAVDVECELTAGYKLFNDSQRITNELFIVKNIASMRKPAASAKLTMFRDALTILGIDDNITDDRISEILKLKEKGKGIHGLRNFITNNVIESSRFVYLIKYANAQKIREVAKNEKVVMFVLGGIPDTQIERYYKSCVEFPDMNSSLEVKRSELARMIKNISFDDFKNVKQQAKGRENVAKERAKAVIGLYLTVMYLLVKNLVNVNARYVIAIHCLERDFGLYKEIIPELASKNLKNDYRILSQTLCELCDXXESPNLFLKKNKRLRKCVEVDINNADSSMTRKYRNCIAHLTVVRELKEYIGDIRTVDSYFSIYHYVMQRCITKREDDTKQEEKIKYEDDLLKNHGYTKDFVKALNSPFGYNIPRFKNLSIEQLFDRNEYLTEK

SEQ ID NO: 107 - protein, 922 aa, Artificial Sequence
  M18_gut_metagenome_P22E0k2120140920_c3395000078
MAKKNKMKPRELREAQKKARQLKAAEINNNAAPAIAAMPAAEVIAPVAEKKKSSVKAAGMKSILVSENKMYITSFGKGNSAVLEYEVDNNDYNKTQLSSKDNSNIELGDVNEVNITFSSKHGFGSGVEINTSNPTHRSGESSPVRGDMLGLKSELEKRFFGKTFDDNIHIQLIYNILDIEKILAVYVTNIVYALNNMLGIKDSESYDDFMGYLSARNTYEVFTHPDKSNLSDKVKGNIKKSLSKFNDLLKTKRLGYFGLEEPKTKDTRASEAYKKRVYHMLAIVGQIRQCVFHDKSGAKRFDLYSFINNIDPEYRDTLDYLVEERLKSINKDFIEGNKVNISLLIDMMKGYEADDIIRLYYDFIVLKSQKNLGFSIKKLREKMLEEYGFRFKDKQYDSVRSKMYKLMDFLLFCNYYRNDVAAGEALVRKLRFSMTDDEKEGIYADEAAKLWGKFRNDFENIADHMNGDVIKELGKADMDFDEKILDSEKKNASDLLYFSKMIYMLTYFLDGKEINDLLTTLISKFDNIKEFLKIMKSSAVDVECELTAGYKLFNDSQRITNELFIVKNIASMRKPAASAKLTMFRDALTILGIDDNITDDRISEILKLKEKGKGIHGLRNFITNNVIESSRFVYLIKYANAQKIREVAKNEKVVMFVLGGIPDTQIERYYKSCVEFPDMNSSLEAKRSELARMIKNISFDDFKNVKQQAKGRENVAKERAKAVIGLYLTVMYLLVKNLVNVNARYVIAIHCLERDFGLYKEIIPELASKNLKNDYRILSQTLCELCDDRNESSNLFLKKNKRLRKCVEVDINNADSSMTRKYRNCIAHLTVVRELKEYIGDIRTVDSYFSIYHYVMQRCITKRGDDTKQEEKIKYEDDLLKNHGYTKDFVKALNSPFGYNIPRFKNLSIEQLFDRNEYLTEK

SEQ ID NO: 108 - protein, 922 aa, Artificial Sequence; identical to SEQ ID NO: 107
  M17_gut_metagenome_P22E90k2120140920_c114

SEQ ID NO: 109 - protein, 922 aa, Artificial Sequence
  Ruminococcus_sp_CAG57
MAKKNKMKPRELREAQKKARQLKAAEINNNAAPAIAAMPAAEVIAPVAEKKKSSVKAAGMKSILVSENKMYITSFGKGNSAVLEYEVDNNDYNKTQLSSKDNSNIELGDVNEVNITFSSKHGFGSGVEINTSNPTHRSGESSPVRGDMLGLKSELEKRFFGKTFDDNIHIQLIYNILDIEKILAVYVTNIVYALNNMLGIKDSESYDDFMGYLSARNTYEVFTHPDKSNLSDKVKGNIKKSLSKFNDLLKTKRLGYFGLEEPKTKDTRASEAYKKRVYHMLAIVGQIRQCVFHDKSGAKRFDLYSFINNIDPEYRDTLDYLVEERLKSINKDFIEGNKVNISLLIDMMKGYEADDIIRLYYDFIVLKSQKNLGFSIKKLREKMLEEYGFRFKDKQYDSVRSKMYKLMDFLLFCNYYRNDVAAGEALVRKLRFSMTDDEKEGIYADEAAKLWGKFRNDFENIADHMNGDVIKELGKADMDFDEKILDSEKKNASDLLYFSKMIYMLTYFLDGKEINDLLTTLISKFDNIKEFLKIMKSSAVDVECELTAGYKLFNDSQRITNELFIVKNIASMRKPAASAKLTMFRDALTILGIDDNITDDRISEILKLKEKGKGIHGLRNFITNNVIESSRFVYLIKYANAQKIREVAKDEKVVMFVLGGIPDTQIERYYKSCVEFPDMNSSLEAKRSELARMIKNISFDDFKNVKQQAKGRENVAKERAKAVIGLYLTVMYLLVKNLVNVNARYVIAIHCLERDFGLYKEIIPELASKNLKNDYRILSQTLCELCDDRNESSNLFLKKNKRLRKCVEVDINNADSSMTRKYRNCIAHLTVVRELKEYIGDIRTVDSYFSIYHYVMQRCITKRGDDTKQEEKIKYEDDLLKNHGYTKDFVKALNSPFGYNIPRFKNLSIEQLFDRNEYLTEK

SEQ ID NO: 110 - protein, 531 aa, Artificial Sequence
  gut_metagenome_P11E90k2120140920_c43000123
FRFKDKQYDSVRSKMYKLMDFLLFCNYYRNDVVAGEALVRKLRFSMTDDEKEGIYADEAAKLWGKFRNDFENIADHMNGDVIKELGKADMDFDEKILDSEKKNASDLLYFSKMIYMLTYFLDGKEINDLLTTLISKFDNIKEFLKIMKSSAVDVECELTAGYKLFNDSQRITNELFIVKNIASMRKPAASARLTMFRDALTILGIDDKITDDRISEILKLKEKGKGIHGLRNFITNNVIESSRFVYLIKYANAQKIREVAKNEKVVMFVLGGIPDTQIERYYKSCVEFPDMNSSLEAKRSELARMIKNISFDDFKNVKQQAKGRENVAKERAKAVIGLYLTVMYLLVKNLVNVNARYVIAIHCLERDFGLYKEIIPELASKNLKNDYRILSQTLCELCDKSPNLFLKKNERLRKCVEVDINNADSSMTRKYRNCIAHLTVVRELKEYIGDIRTVDSYFSIYHYVMQRCITKRENDTKQEDKIKYEDDLLKNHGYTKDFVKALNSPFGYNIPRFKNLSIEQLFDRNEYLTEK

SEQ ID NO: 111 - protein, 925 aa, Artificial Sequence
  M6_gut_metagenome_P13E90k2120140920_c7000009
MAKKNKMKPRELREAQKKARQLKAAEIKNNAVPAIAAMPAAEAAAPAVEKKKSSVKAAGMKSILVSENKMYITSFGKGNSAVLEYEVDKVDNNNYNKTQLSSKDNSNIELGDVNEVNITFSSKRGNESGVEINTSNPTHRSGESSPVRWDMLGLKSELEKRFFGKTFDDNIHIQLIYNILDIEKILAVYVTNIVYALNNMLGIKGSESYDDFMGYLSARNTYEVFTHPDKSNLSDKVKGNIKKSLSKFNDLLKTKRLGYFGLEEPKTKDTRVSQAYKKRVYHMLAIVGQIRQCVFHDKSGAKRFDLYSFINNIDPEYRDTLDYLVEERLKSINKDFIEGNKVNISLLIDMMKGYEADDIIRLYYDFIVLKSQKNLGFSIKKLREKMLEEYGYRFKDKQYDSVRSKMYKLMDFLLFCNYYRNDVVAGEALVRKLRFSMTDDEKEGIYADEASKLWGKFRNDFENIADHMNGDVIKELGKADMDFDEKILDSEKKNASDLLYFSKMIYMLTYFLDGKEINDLLTTLISKFDNIKEFLKIMKSSAVDVECELTAGYKLFNDSQRITNELFIVKNIASMRKPAASAKLTMFRDALTILGIDDKITDDRISEILKLKEKGKGIHGLRNFITNNVIESSRFVYLIKYANAQKIREVAKNEKVVMFVLGGIPDTQIERYYKSCVEFPDMNSSLEAKRSELARMIKNIRFDDFKNVKQQAKGRENVAKERAKAVIGLYLTVMYLLVKNLVNVNARYVIAIHCLERDFGLYKEIIPELASKNLKNDYRILSQTLCELCDDRDESPNLFLKKNKRLRKCVEVDINNADSSMTRKYRNCIAHLTVVRELKEYIGDIRTVDSYFSIYHYVMQRCITKREDDTKQEEKIKYEDDLLKNHGYTKDFVKALNSPFGYNIPRFKNLSIEQLFDRNEYLTEK

SEQ ID NO: 112 - protein, 921 aa, Artificial Sequence
  M19_gut_metagenome_P17E90k2120140920
MAKKNKMKPRERREAQKKARQLKAAEINNNAVPAIAAMHAAEVIAPAAEKKKSSVKAAGMKSILVSENKMYITSFGKGNSAVLEYEVDNNDYNQTQLSSKDNSNIELCGVTKVNITFSSKHGFESGVEINTSNPTHRSGESSPVRGDMLGLKSELEKRFFGKTFDDNIHIQLIYNILDIEKILAVYVTNIVYALNNMLGEGDESNYDFMGYLSTFNTYKVFTNPNGSTLSDDKKENIRKSLSKFNALLKTKRLGYFGLEEPKTKDTRASEAYKKRVYHMLAIVGQIRQCVFHDKSGAKRFDLYSFINNIYPEYRDTLDYLVEERLKSINKDFIQGNKVNISLLIDMMKGYEADDIIRLYYDFIVLKSQKNLGFSIKKLREKMLDEYGFRFKDKQYDSVRSKMYKLMDFLLFCNYYRNDVVAGEALVRKLRFSMTDDEKEGIYADEAAKLWGKFRNDFENIADHMNGDVIKELGKADMDFDEKILDSEKKNASDLLYFSKMIYMLTYFLDGKEINDLLTTLISKFDNIKEFLKIMKSSAVDVECELTAGYKLFNDSQRITNELFIVKNIASMRKPAASAKLTMFRDALTILGIDDKITDDRISEILKLKEKGKGIHGLRNFITNNVIESSRFVYLIKYANAQKIREVAKNEKVVMFVLGGIPDTQIERYYKSCVEFPDMNSSLEAKRSELARMIKNISFDDFKNVKQQAKGRENVAKERAKAVIGLYLTVMYLLVKNLVNVNARYVIAIHCLERDFGLYKEIIPELASKNLKNDYRILSQTLCELCDDRDESPNLFLKKNKRLRKCVEVDINNADSSMTRKYRNCIAHLTVVRELKKYIGDIRTVDSYFSIYHYVMQRCITKREDDTKQEEKIKYEDDLLKNHGYTKDFVKALNSPFGYNIPRFKNLSIEQLFDRNEYLTEK

SEQ ID NO: 113 - protein, 234 aa, Artificial Sequence
  gut_metagenome_P17E0k2120140920,_c87000043
MYFSKMIYMLTYFLDGKEINDLLTTLISKFDNIKEFLKIMKSSAVDVECELTAGYKLFNDSQRITNELFIVKNIASMRKPAASAKLTMFRDALTILGIDDKITDDRISEILKLKEKGKGIHGLRNFITNNVIESSRFVYLIKYANAQKIREVAKNEKVVMFVLGGIPDTQIERYYKSCVEFPDMNSSLEAKRSELARMIKNISFDDFKNVKQQAKGRENVAKERAKAVIGLYLT

SEQ ID NO: 114 - DNA, 2859 bp, Artificial Sequence
  Human codon-optimized Eubacterium siraeum nCas1
ggcaagaagatccatgccagggacctcagggagcaaagaaagaccgataggacagaaaagttcgccgatcagaacaagaagagggaggctgagagagctgtgcccaaaaaagacgccgccgtctccgtgaagagcgtgtccagcgtcagcagcaagaaggacaacgtcaccaagagcatggccaaggccgccggagtgaagtccgtctttgctgtgggaaacaccgtgtacatgacctccttcggcaggggcaacgatgccgtgctggagcagaaaatcgtggacacctcccatgagcccctgaatatcgacgatcccgcctatcaactcaacgtggtgaccatgaatggatacagcgtcacaggccatagaggagagacagtgtccgccgtgacagataatcccctgaggagattcaacggcaggaagaaggacgaacccgagcagagcgtccctacagacatgctctgcctgaagcccaccctcgagaaaaaattttttggaaaggagtttgatgacaacattcatattcagctgatctataatatcctggatatcgagaaaatcctggccgtgtactccaccaacgccatctacgctctcaacaacatgtccgccgacgaaaacatcgagaactccgacttcttcatgaaaagaacaacagacgagacctttgacgacttcgagaagaagaaggagagcaccaacagcagagagaaagctgactttgacgcctttgaaaagttcatcggaaactataggctggcctatttcgctgacgctttctacgtgaataaaaagaaccccaagggaaaggccaagaatgtcctgagggaggacaaggagctctacagcgtgctgacactgatcggaaagctgagacactggtgtgtccacagcgaggaaggaagggctgaattctggctgtacaagctggacgagctcaaagacgatttcaagaacgtcctggatgtggtgtataacagacccgtggaggagatcaacaacaggttcatcgaaaataacaaagtcaacatccagatcctgggctccgtgtataagaacaccgacatcgccgagctggtgaggtcctactatgagttcctgatcaccaaaaaatacaagaatatgggcttttccatcaagaagctcagggagagcatgctggagggcaagggctacgctgataaggagtacgatagcgtgagaaataagctgtaccagatgaccgatttcatcctctacaccggctacatcaacgaagatagcgatagggctgacgacctggtgaacacactgaggagctccctcaaggaggacgacaaaacaaccgtctactgcaaggaggccgattacctgtggaaaaagtacagggaaagcattagagaagtcgccgatgccctggatggcgacaacattaagaagctgtccaagagcaatattgagattcaggaggataagctgagaaaatgtttcattagctatgctgatagcgtgagcgagtttaccaagctgatctacctcctcacaagattcctgagcggcaaggagatcaatgacctggtgaccaccctgatcaacaagttcgataatattagatcctttctggagattatggatgaactgggcctggacaggacatttaccgccgagtacagcttcttcgaaggctccacaaagtacctggccgagctcgtggagctgaatagctttgtgaagtcctgctccttcgacatcaatgccaagaggaccatgtacagggacgccctggatatcctgggcatcgagtccgacaagaccgaggaggatattgagaagatgattgataatatcctgcagatcgacgccaacggagataaaaagctgaagaaaaacaacggactgagaaacttcatcgcttccaacgtcatcgacagcaatagattcaaatacctggtcaggtacggcaaccccaagaagattagagagacagccaagtgcaagcccgctgtgaggttcgtgctgaacgaaattcccgacgcccagatcgaaaggtactatgaggcttgctgccccaagaacaccgccctctgcagcgccaataagagaagggagaagctggccgacatgatcgctgagatcaaattcgagaattttagcgatgccggcaattaccagaaggctaacgtcacatccaggaccagcgaggccgagatcaagagaaaaaaccaggccattattaggctctatctgacagtgatgtatattatgctgaaaaacctggtgaacgtgaatgccaggtacgtcattgccttccactgcgtggaaagggacaccaagctgtacgccgaaagcggcctggaagtgggcaacatcgaaaagaacaaaacaaacctcaccatggccgtgatgggagtgaaactcgaaaacggaattatcaagacagagttcgataagagcttcgccgagaacgccgctaacagatacctgaggaacgccaggtggtataaactgatcctggacaacctgaaaaaatccgagagagccgtggtgaatgagttcagaaataccgtgtgccacctgaatgccatcaggaacatcaatatcaacatcaaggaaattaaggaggtggagaattatttcgctctgtaccactacctgatccagaagcacctggagaacaggttcgccgataagaaggtggaaagggatacaggcgatttcatcagcaaactggaggagcacaagacctattgcaaagactttgtgaaggcttactgcaccccctttggctacaacctggtgagatataagaatctcaccattgacggcctcttcgacaagaactaccctggcaaggatgactccgatgagcagaag

SEQ ID NO: 115 - DNA, 2862 bp, Artificial Sequence
  Human codon-optimized Eubacterium siraeum nCas1 HEPN-/-
ggcaagaagatccatgccagggacctcagggagcaaagaaagaccgataggacagaaaagttcgccgatcagaacaagaagagggaggctgagagagctgtgcccaaaaaagacgccgccgtctccgtgaagagcgtgtccagcgtcagcagcaagaaggacaacgtcaccaagagcatggccaaggccgccggagtgaagtccgtctttgctgtgggaaacaccgtgtacatgacctccttcggcaggggcaacgatgccgtgctggagcagaaaatcgtggacacctcccatgagcccctgaatatcgacgatcccgcctatcaactcaacgtggtgaccatgaatggatacagcgtcacaggccatagaggagagacagtgtccgccgtgacagataatcccctgaggagattcaacggcaggaagaaggacgaacccgagcagagcgtccctacagacatgctctgcctgaagcccaccctcgagaaaaaattttttggaaaggagtttgatgacaacattcatattcagctgatctataatatcctggatatcgagaaaatcctggccgtgtactccaccaacgccatctacgctctcaacaacatgtccgccgacgaaaacatcgagaactccgacttcttcatgaaaagaacaacagacgagacctttgacgacttcgagaagaagaaggagagcaccaacagcagagagaaagctgactttgacgcctttgaaaagttcatcggaaactataggctggcctatttcgctgacgctttctacgtgaataaaaagaaccccaagggaaaggccaagaatgtcctgagggaggacaaggagctctacagcgtgctgacactgatcggaaagctggcacactggtgtgtcgccagcgaggaaggaagggctgaattctggctgtacaagctggacgagctcaaagacgatttcaagaacgtcctggatgtggtgtataacagacccgtggaggagatcaacaacaggttcatcgaaaataacaaagtcaacatccagatcctgggctccgtgtataagaacaccgacatcgccgagctggtgaggtcctactatgagttcctgatcaccaaaaaatacaagaatatgggcttttccatcaagaagctcagggagagcatgctggagggcaagggctacgctgataaggagtacgatagcgtgagaaataagctgtaccagatgaccgatttcatcctctacaccggctacatcaacgaagatagcgatagggctgacgacctggtgaacacactgaggagctccctcaaggaggacgacaaaacaaccgtctactgcaaggaggccgattacctgtggaaaaagtacagggaaagcattagagaagtcgccgatgccctggatggcgacaacattaagaagctgtccaagagcaatattgagattcaggaggataagctgagaaaatgtttcattagctatgctgatagcgtgagcgagtttaccaagctgatctacctcctcacaagattcctgagcggcaaggagatcaatgacctggtgaccaccctgatcaacaagttcgataatattagatcctttctggagattatggatgaactgggcctggacaggacatttaccgccgagtacagcttcttcgaaggctccacaaagtacctggccgagctcgtggagctgaatagctttgtgaagtcctgctccttcgacatcaatgccaagaggaccatgtacagggacgccctggatatcctgggcatcgagtccgacaagaccgaggaggatattgagaagatgattgataatatcctgcagatcgacgccaacggagataaaaagctgaagaaaaacaacggactgagaaacttcatcgcttccaacgtcatcgacagcaatagattcaaatacctggtcaggtacggcaaccccaagaagattagagagacagccaagtgcaagcccgctgtgaggttcgtgctgaacgaaattcccgacgcccagatcgaaaggtactatgaggcttgctgccccaagaacaccgccctctgcagcgccaataagagaagggagaagctggccgacatgatcgctgagatcaaattcgagaattttagcgatgccggcaattaccagaaggctaacgtcacatccaggaccagcgaggccgagatcaagagaaaaaaccaggccattattaggctctatctgacagtgatgtatattatgctgaaaaacctggtgaacgtgaatgccaggtacgtcattgccttccactgcgtggaaagggacaccaagctgtacgccgaaagcggcctggaagtgggcaacatcgaaaagaacaaaacaaacctcaccatggccgtgatgggagtgaaactcgaaaacggaattatcaagacagagttcgataagagcttcgccgagaacgccgctaacagatacctgaggaacgccaggtggtataaactgatcctggacaacctgaaaaaatccgagagagccgtggtgaatgagttcgcaaataccgtgtgcgccctgaatgccatcaggaacatcaatatcaacatcaaggaaattaaggaggtggagaattatttcgctctgtaccactacctgatccagaagcacctggagaacaggttcgccgataagaaggtggaaagggatacaggcgatttcatcagcaaactggaggagcacaagacctattgcaaagactttgtgaaggcttactgcaccccctttggctacaacctggtgagatataagaatctcaccattgacggcctcttcgacaagaactaccctggcaaggatgactccgatgagcagaagtga

SEQ ID NO: 116 - DNA, 2892 bp, Artificial Sequence
  Human codon-optimized Eubacterium siraeum nCas1 with N-terminal NLS
agccccaagaagaagagaaaggtggaggccagcggcaagaagatccatgccagggacctcagggagcaaagaaagaccgataggacagaaaagttcgccgatcagaacaagaagagggaggctgagagagctgtgcccaaaaaagacgccgccgtctccgtgaagagcgtgtccagcgtcagcagcaagaaggacaacgtcaccaagagcatggccaaggccgccggagtgaagtccgtctttgctgtgggaaacaccgtgtacatgacctccttcggcaggggcaacgatgccgtgctggagcagaaaatcgtggacacctcccatgagcccctgaatatcgacgatcccgcctatcaactcaacgtggtgaccatgaatggatacagcgtcacaggccatagaggagagacagtgtccgccgtgacagataatcccctgaggagattcaacggcaggaagaaggacgaacccgagcagagcgtccctacagacatgctctgcctgaagcccaccctcgagaaaaaattttttggaaaggagtttgatgacaacattcatattcagctgatctataatatcctggatatcgagaaaatcctggccgtgtactccaccaacgccatctacgctctcaacaacatgtccgccgacgaaaacatcgagaactccgacttcttcatgaaaagaacaacagacgagacctttgacgacttcgagaagaagaaggagagcaccaacagcagagagaaagctgactttgacgcctttgaaaagttcatcggaaactataggctggcctatttcgctgacgctttctacgtgaataaaaagaaccccaagggaaaggccaagaatgtcctgagggaggacaaggagctctacagcgtgctgacactgatcggaaagctgagacactggtgtgtccacagcgaggaaggaagggctgaattctggctgtacaagctggacgagctcaaagacgatttcaagaacgtcctggatgtggtgtataacagacccgtggaggagatcaacaacaggttcatcgaaaataacaaagtcaacatccagatcctgggctccgtgtataagaacaccgacatcgccgagctggtgaggtcctactatgagttcctgatcaccaaaaaatacaagaatatgggcttttccatcaagaagctcagggagagcatgctggagggcaagggctacgctgataaggagtacgatagcgtgagaaataagctgtaccagatgaccgatttcatcctctacaccggctacatcaacgaagatagcgatagggctgacgacctggtgaacacactgaggagctccctcaaggaggacgacaaaacaaccgtctactgcaaggaggccgattacctgtggaaaaagtacagggaaagcattagagaagtcgccgatgccctggatggcgacaacattaagaagctgtccaagagcaatattgagattcaggaggataagctgagaaaatgtttcattagctatgctgatagcgtgagcgagtttaccaagctgatctacctcctcacaagattcctgagcggcaaggagatcaatgacctggtgaccaccctgatcaacaagttcgataatattagatcctttctggagattatggatgaactgggcctggacaggacatttaccgccgagtacagcttcttcgaaggctccacaaagtacctggccgagctcgtggagctgaatagctttgtgaagtcctgctccttcgacatcaatgccaagaggaccatgtacagggacgccctggatatcctgggcatcgagtccgacaagaccgaggaggatattgagaagatgattgataatatcctgcagatcgacgccaacggagataaaaagctgaagaaaaacaacggactgagaaacttcatcgcttccaacgtcatcgacagcaatagattcaaatacctggtcaggtacggcaaccccaagaagattagagagacagccaagtgcaagcccgctgtgaggttcgtgctgaacgaaattcccgacgcccagatcgaaaggtactatgaggcttgctgccccaagaacaccgccctctgcagcgccaataagagaagggagaagctggccgacatgatcgctgagatcaaattcgagaattttagcgatgccggcaattaccagaaggctaacgtcacatccaggaccagcgaggccgagatcaagagaaaaaaccaggccattattaggctctatctgacagtgatgtatattatgctgaaaaacctggtgaacgtgaatgccaggtacgtcattgccttccactgcgtggaaagggacaccaagctgtacgccgaaagcggcctggaagtgggcaacatcgaaaagaacaaaacaaacctcaccatggccgtgatgggagtgaaactcgaaaacggaattatcaagacagagttcgataagagcttcgccgagaacgccgctaacagatacctgaggaacgccaggtggtataaactgatcctggacaacctgaaaaaatccgagagagccgtggtgaatgagttcagaaataccgtgtgccacctgaatgccatcaggaacatcaatatcaacatcaaggaaattaaggaggtggagaattatttcgctctgtaccactacctgatccagaagcacctggagaacaggttcgccgataagaaggtggaaagggatacaggcgatttcatcagcaaactggaggagcacaagacctattgcaaagactttgtgaaggcttactgcaccccctttggctacaacctggtgagatataagaatctcaccattgacggcctcttcgacaagaactaccctggcaaggatgactccgatgagcagaag

SEQ ID NO: 117 - DNA, 2931 bp, Artificial Sequence
  Human codon-optimized Eubacterium siraeum nCas1 with N- and C-terminal NLS tags
agccccaagaagaagagaaaggtggaggccagcggcaagaagatccatgccagggacctcagggagcaaagaaagaccgataggacagaaaagttcgccgatcagaacaagaagagggaggctgagagagctgtgcccaaaaaagacgccgccgtctccgtgaagagcgtgtccagcgtcagcagcaagaaggacaacgtcaccaagagcatggccaaggccgccggagtgaagtccgtctttgctgtgggaaacaccgtgtacatgacctccttcggcaggggcaacgatgccgtgctggagcagaaaatcgtggacacctcccatgagcccctgaatatcgacgatcccgcctatcaactcaacgtggtgaccatgaatggatacagcgtcacaggccatagaggagagacagtgtccgccgtgacagataatcccctgaggagattcaacggcaggaagaaggacgaacccgagcagagcgtccctacagacatgctctgcctgaagcccaccctcgagaaaaaattttttggaaaggagtttgatgacaacattcatattcagctgatctataatatcctggatatcgagaaaatcctggccgtgtactccaccaacgccatctacgctctcaacaacatgtccgccgacgaaaacatcgagaactccgacttcttcatgaaaagaacaacagacgagacctttgacgacttcgagaagaagaaggagagcaccaacagcagagagaaagctgactttgacgcctttgaaaagttcatcggaaactataggctggcctatttcgctgacgctttctacgtgaataaaaagaaccccaagggaaaggccaagaatgtcctgagggaggacaaggagctctacagcgtgctgacactgatcggaaagctgagacactggtgtgtccacagcgaggaaggaagggctgaattctggctgtacaagctggacgagctcaaagacgatttcaagaacgtcctggatgtggtgtataacagacccgtggaggagatcaacaacaggttcatcgaaaataacaaagtcaacatccagatcctgggctccgtgtataagaacaccgacatcgccgagctggtgaggtcctactatgagttcctgatcaccaaaaaatacaagaatatgggcttttccatcaagaagctcagggagagcatgctggagggcaagggctacgctgataaggagtacgatagcgtgagaaataagctgtaccagatgaccgatttcatcctctacaccggctacatcaacgaagatagcgatagggctgacgacctggtgaacacactgaggagctccctcaaggaggacgacaaaacaaccgtctactgcaaggaggccgattacctgtggaaaaagtacagggaaagcattagagaagtcgccgatgccctggatggcgacaacattaagaagctgtccaagagcaatattgagattcaggaggataagctgagaaaatgtttcattagctatgctgatagcgtgagcgagtttaccaagctgatctacctcctcacaagattcctgagcggcaaggagatcaatgacctggtgaccaccctgatcaacaagttcgataatattagatcctttctggagattatggatgaactgggcctggacaggacatttaccgccgagtacagcttcttcgaaggctccacaaagtacctggccgagctcgtggagctgaatagctttgtgaagtcctgctccttcgacatcaatgccaagaggaccatgtacagggacgccctggatatcctgggcatcgagtccgacaagaccgaggaggatattgagaagatgattgataatatcctgcagatcgacgccaacggagataaaaagctgaagaaaaacaacggactgagaaacttcatcgcttccaacgtcatcgacagcaatagattcaaatacctggtcaggtacggcaaccccaagaagattagagagacagccaagtgcaagcccgctgtgaggttcgtgctgaacgaaattcccgacgcccagatcgaaaggtactatgaggcttgctgccccaagaacaccgccctctgcagcgccaataagagaagggagaagctggccgacatgatcgctgagatcaaattcgagaattttagcgatgccggcaattaccagaaggctaacgtcacatccaggaccagcgaggccgagatcaagagaaaaaaccaggccattattaggctctatctgacagtgatgtatattatgctgaaaaacctggtgaacgtgaatgccaggtacgtcattgccttccactgcgtggaaagggacaccaagctgtacgccgaaagcggcctggaagtgggcaacatcgaaaagaacaaaacaaacctcaccatggccgtgatgggagtgaaactcgaaaacggaattatcaagacagagttcgataagagcttcgccgagaacgccgctaacagatacctgaggaacgccaggtggtataaactgatcctggacaacctgaaaaaatccgagagagccgtggtgaatgagttcagaaataccgtgtgccacctgaatgccatcaggaacatcaatatcaacatcaaggaaattaaggaggtggagaattatttcgctctgtaccactacctgatccagaagcacctggagaacaggttcgccgataagaaggtggaaagggatacaggcgatttcatcagcaaactggaggagcacaagacctattgcaaagactttgtgaaggcttactgcaccccctttggctacaacctggtgagatataagaatctcaccattgacggcctcttcgacaagaactaccctggcaaggatgactccgatgagcagaagggatccggacctaagaaaaagaggaaggtggcggccgct

SEQ ID NO: 118 - DNA, 2754 bp, Artificial Sequence
  Human codon-optimized uncultured Ruminococcus sp. nCas1
gccaagaagaacaagatgaaacccagggagctgagagaggctcagaagaaggctaggcaactgaaagccgccgagatcaataacaatgccgcccctgccatcgccgctatgcccgctgccgaagtcatcgctcccgccgccgaaaagaagaagagctccgtgaaagccgctggaatgaagtccattctggtgtccgagaacaaaatgtatatcacctccttcggcaaaggcaattccgctgtgctggagtatgaggtggacaacaacgactacaatcagacccagctcagcagcaaggataactccaacatccagctgggcggcgtgaatgaagtgaatatcaccttcagcagcaagcacggatttgagtccggagtcgagattaacacaagcaaccctacccacaggtccggagaaagcagccctgtcagaggagacatgctgggactgaaaagcgagctggagaagagattctttggaaagacctttgatgacaatatccacatccagctcatttacaacatcctggatatcgagaaaatcctggccgtgtatgtgaccaacatcgtgtacgctctgaacaacatgctcggcgtcaagggcagcgagtcccacgacgactttattggctatctgtccaccaacaatatttacgatgtcttcattgaccccgacaacagcagcctctccgacgacaaaaaagccaacgtcaggaagagcctcagcaaattcaacgccctgctgaagaccaagaggctcggatactttggcctggaggaacccaagaccaaggacaacagagtgagccaggcctataagaaaagggtgtaccacatgctggccatcgtgggccagatcagacagtgcgtgttccatgacaagtccggcgccaagagattcgacctgtactccttcattaacaacatcgaccctgagtacagggatacactggattacctcgtggaggagaggctgaagagcatcaacaaagactttattgaggacaacaaagtcaacatcagcctgctgatcgatatgatgaagggctacgaagctgacgacatcatcaggctgtactatgatttcattgtcctgaagagccagaagaacctgggattctccattaagaaactgagagaaaagatgctcgacgagtacggcttcaggttcaaggacaagcagtatgacagcgtgagatccaagatgtacaagctgatggattttctcctgttttgcaactattacaggaacgacatcgccgccggcgaatccctggtcaggaaactgagattcagcatgaccgacgacgagaaggaaggcatctacgccgacgaagccgctaagctgtggggaaaatttagaaatgacttcgagaacatcgctgaccacatgaacggcgatgtgatcaaggagctcggcaaggctgacatggatttcgacgagaagatcctggattccgagaagaagaatgccagcgatctgctgtacttcagcaagatgatttacatgctcacatattttctcgatggcaaggagatcaacgatctcctgaccacactgatcagcaagttcgacaacattaaagagttcctcaaaattatgaaatccagcgccgtggatgtcgagtgcgaactcaccgccggctacaagctcttcaacgacagccagaggatcaccaatgagctgttcattgtgaaaaatatcgctagcatgaggaaacccgccgcctccgctaaactgacaatgtttagagatgccctcaccatcctgggcatcgacgataagatcacagacgacagaattagcggaatcctgaagctcaaggaaaagggcaagggaatccatggcctcagaaatttcattaccaataacgtgatcgaaagcagcaggttcgtgtatctgatcaagtacgccaatgcccaaaagatcagggaggtggccaagaacgaaaaggtggtgatgttcgtgctgggcggcattcctgacacacagatcgaaaggtactacaagagctgtgtggagttccccgatatgaactccagcctgggcgtgaagagatccgaactggctaggatgatcaagaatattagcttcgacgacttcaagaacgtgaagcaacaggccaaaggaagggagaacgtcgccaaagagagagccaaggccgtgatcggactctacctgaccgtcatgtacctcctcgtgaagaacctggtgaacgtgaacgctagatacgtcatcgccatccattgcctcgagagggacttcggactgtacaaggagatcattcccgagctggccagcaaaaatctcaagaacgattacagaatcctgagccaaaccctgtgcgagctgtgtgacaagtcccccaacctgtttctgaagaagaatgaaaggctgagaaagtgcgtcgaagtcgacatcaacaacgctgacagctccatgaccaggaaatacaggaactgtatcgcccatctgaccgtggtgagggaactcaaggagtacatcggagatatctgcaccgtggactcctacttcagcatttatcactacgtgatgcagaggtgcattaccaagagagaaaatgacacaaagcaggaggagaagattaagtacgaggacgatctgctgaaaaaccacggatacaccaaggatttcgtcaaggccctcaatagccccttcggctacaatatccctaggtttaaaaacctgagcatcgagcagctgtttgacagaaatgaatacctgacagagaag

SEQ ID NO: 119 - DNA, 2757 bp, Artificial Sequence
  Human codon-optimized uncultured Ruminococcus sp. nCas1 HEPN-/-
atggccaagaagaacaagatgaaacccagggagctgagagaggctcagaagaaggctaggcaactgaaagccgccgagatcaataacaatgccgcccctgccatcgccgctatgcccgctgccgaagtcatcgctcccgccgccgaaaagaagaagagctccgtgaaagccgctggaatgaagtccattctggtgtccgagaacaaaatgtatatcacctccttcggcaaaggcaattccgctgtgctggagtatgaggtggacaacaacgactacaatcagacccagctcagcagcaaggataactccaacatccagctgggcggcgtgaatgaagtgaatatcaccttcagcagcaagcacggatttgagtccggagtcgagattaacacaagcaaccctacccacaggtccggagaaagcagccctgtcagaggagacatgctgggactgaaaagcgagctggagaagagattctttggaaagacctttgatgacaatatccacatccagctcatttacaacatcctggatatcgagaaaatcctggccgtgtatgtgaccaacatcgtgtacgctctgaacaacatgctcggcgtcaagggcagcgagtcccacgacgactttattggctatctgtccaccaacaatatttacgatgtcttcattgaccccgacaacagcagcctctccgacgacaaaaaagccaacgtcaggaagagcctcagcaaattcaacgccctgctgaagaccaagaggctcggatactttggcctggaggaacccaagaccaaggacaacagagtgagccaggcctataagaaaagggtgtaccacatgctggccatcgtgggccagatcgcacagtgcgtgttcgctgacaagtccggcgccaagagattcgacctgtactccttcattaacaacatcgaccctgagtacagggatacactggattacctcgtggaggagaggctgaagagcatcaacaaagactttattgaggacaacaaagtcaacatcagcctgctgatcgatatgatgaagggctacgaagctgacgacatcatcaggctgtactatgatttcattgtcctgaagagccagaagaacctgggattctccattaagaaactgagagaaaagatgctcgacgagtacggcttcaggttcaaggacaagcagtatgacagcgtgagatccaagatgtacaagctgatggattttctcctgttttgcaactattacaggaacgacatcgccgccggcgaatccctggtcaggaaactgagattcagcatgaccgacgacgagaaggaaggcatctacgccgacgaagccgctaagctgtggggaaaatttagaaatgacttcgagaacatcgctgaccacatgaacggcgatgtgatcaaggagctcggcaaggctgacatggatttcgacgagaagatcctggattccgagaagaagaatgccagcgatctgctgtacttcagcaagatgatttacatgctcacatattttctcgatggcaaggagatcaacgatctcctgaccacactgatcagcaagttcgacaacattaaagagttcctcaaaattatgaaatccagcgccgtggatgtcgagtgcgaactcaccgccggctacaagctcttcaacgacagccagaggatcaccaatgagctgttcattgtgaaaaatatcgctagcatgaggaaacccgccgcctccgctaaactgacaatgtttagagatgccctcaccatcctgggcatcgacgataagatcacagacgacagaattagcggaatcctgaagctcaaggaaaagggcaagggaatccatggcctcagaaatttcattaccaataacgtgatcgaaagcagcaggttcgtgtatctgatcaagtacgccaatgcccaaaagatcagggaggtggccaagaacgaaaaggtggtgatgttcgtgctgggcggcattcctgacacacagatcgaaaggtactacaagagctgtgtggagttccccgatatgaactccagcctgggcgtgaagagatccgaactggctaggatgatcaagaatattagcttcgacgacttcaagaacgtgaagcaacaggccaaaggaagggagaacgtcgccaaagagagagccaaggccgtgatcggactctacctgaccgtcatgtacctcctcgtgaagaacctggtgaacgtgaacgctagatacgtcatcgccatccattgcctcgagagggacttcggactgtacaaggagatcattcccgagctggccagcaaaaatctcaagaacgattacagaatcctgagccaaaccctgtgcgagctgtgtgacaagtcccccaacctgtttctgaagaagaatgaaaggctgagaaagtgcgtcgaagtcgacatcaacaacgctgacagctccatgaccaggaaatacgcgaactgtatcgccgctctgaccgtggtgagggaactcaaggagtacatcggagatatctgcaccgtggactcctacttcagcatttatcactacgtgatgcagaggtgcattaccaagagagaaaatgacacaaagcaggaggagaagattaagtacgaggacgatctgctgaaaaaccacggatacaccaaggatttcgtcaaggccctcaatagccccttcggctacaatatccctaggtttaaaaacctgagcatcgagcagctgtttgacagaaatgaatacctgacagagaag

SEQ ID NO: 120 - DNA, 2787 bp, Artificial Sequence
  Human codon-optimized uncultured Ruminococcus sp. nCas1 with N-terminal NLS
agccccaagaagaagagaaaggtggaggccagcgccaagaagaacaagatgaaacccagggagctgagagaggctcagaagaaggctaggcaactgaaagccgccgagatcaataacaatgccgcccctgccatcgccgctatgcccgctgccgaagtcatcgctcccgccgccgaaaagaagaagagctccgtgaaagccgctggaatgaagtccattctggtgtccgagaacaaaatgtatatcacctccttcggcaaaggcaattccgctgtgctggagtatgaggtggacaacaacgactacaatcagacccagctcagcagcaaggataactccaacatccagctgggcggcgtgaatgaagtgaatatcaccttcagcagcaagcacggatttgagtccggagtcgagattaacacaagcaaccctacccacaggtccggagaaagcagccctgtcagaggagacatgctgggactgaaaagcgagctggagaagagattctttggaaagacctttgatgacaatatccacatccagctcatttacaacatcctggatatcgagaaaatcctggccgtgtatgtgaccaacatcgtgtacgctctgaacaacatgctcggcgtcaagggcagcgagtcccacgacgactttattggctatctgtccaccaacaatatttacgatgtcttcattgaccccgacaacagcagcctctccgacgacaaaaaagccaacgtcaggaagagcctcagcaaattcaacgccctgctgaagaccaagaggctcggatactttggcctggaggaacccaagaccaaggacaacagagtgagccaggcctataagaaaagggtgtaccacatgctggccatcgtgggccagatcagacagtgcgtgttccatgacaagtccggcgccaagagattcgacctgtactccttcattaacaacatcgaccctgagtacagggatacactggattacctcgtggaggagaggctgaagagcatcaacaaagactttattgaggacaacaaagtcaacatcagcctgctgatcgatatgatgaagggctacgaagctgacgacatcatcaggctgtactatgatttcattgtcctgaagagccagaagaacctgggattctccattaagaaactgagagaaaagatgctcgacgagtacggcttcaggttcaaggacaagcagtatgacagcgtgagatccaagatgtacaagctgatggattttctcctgttttgcaactattacaggaacgacatcgccgccggcgaatccctggtcaggaaactgagattcagcatgaccgacgacgagaaggaaggcatctacgccgacgaagccgctaagctgtggggaaaatttagaaatgacttcgagaacatcgctgaccacatgaacggcgatgtgatcaaggagctcggcaaggctgacatggatttcgacgagaagatcctggattccgagaagaagaatgccagcgatctgctgtacttcagcaagatgatttacatgctcacatattttctcgatggcaaggagatcaacgatctcctgaccacactgatcagcaagttcgacaacattaaagagttcctcaaaattatgaaatccagcgccgtggatgtcgagtgcgaactcaccgccggctacaagctcttcaacgacagccagaggatcaccaatgagctgttcattgtgaaaaatatcgctagcatgaggaaacccgccgcctccgctaaactgacaatgtttagagatgccctcaccatcctgggcatcgacgataagatcacagacgacagaattagcggaatcctgaagctcaaggaaaagggcaagggaatccatggcctcagaaatttcattaccaataacgtgatcgaaagcagcaggttcgtgtatctgatcaagtacgccaatgcccaaaagatcagggaggtggccaagaacgaaaaggtggtgatgttcgtgctgggcggcattcctgacacacagatcgaaaggtactacaagagctgtgtggagttccccgatatgaactccagcctgggcgtgaagagatccgaactggctaggatgatcaagaatattagcttcgacgacttcaagaacgtgaagcaacaggccaaaggaagggagaacgtcgccaaagagagagccaaggccgtgatcggactctacctgaccgtcatgtacctcctcgtgaagaacctggtgaacgtgaacgctagatacgtcatcgccatccattgcctcgagagggacttcggactgtacaaggagatcattcccgagctggccagcaaaaatctcaagaacgattacagaatcctgagccaaaccctgtgcgagctgtgtgacaagtcccccaacctgtttctgaagaagaatgaaaggctgagaaagtgcgtcgaagtcgacatcaacaacgctgacagctccatgaccaggaaatacaggaactgtatcgcccatctgaccgtggtgagggaactcaaggagtacatcggagatatctgcaccgtggactcctacttcagcatttatcactacgtgatgcagaggtgcattaccaagagagaaaatgacacaaagcaggaggagaagattaagtacgaggacgatctgctgaaaaaccacggatacaccaaggatttcgtcaaggccctcaatagccccttcggctacaatatccctaggtttaaaaacctgagcatcgagcagctgtttgacagaaatgaatacctgacagagaag

SEQ ID NO: 121 - DNA, 2826 bp, Artificial Sequence
  Human codon-optimized uncultured Ruminococcus sp. nCas1 with N- and C-terminal NLS tags
agccccaagaagaagagaaaggtggaggccagcgccaagaagaacaagatgaaacccagggagctgagagaggctcagaagaaggctaggcaactgaaagccgccgagatcaataacaatgccgcccctgccatcgccgctatgcccgctgccgaagtcatcgctcccgccgccgaaaagaagaagagctccgtgaaagccgctggaatgaagtccattctggtgtccgagaacaaaatgtatatcacctccttcggcaaaggcaattccgctgtgctggagtatgaggtggacaacaacgactacaatcagacccagctcagcagcaaggataactccaacatccagctgggcggcgtgaatgaagtgaatatcaccttcagcagcaagcacggatttgagtccggagtcgagattaacacaagcaaccctacccacaggtccggagaaagcagccctgtcagaggagacatgctgggactgaaaagcgagctggagaagagattctttggaaagacctttgatgacaatatccacatccagctcatttacaacatcctggatatcgagaaaatcctggccgtgtatgtgaccaacatcgtgtacgctctgaacaacatgctcggcgtcaagggcagcgagtcccacgacgactttattggctatctgtccaccaacaatatttacgatgtcttcattgaccccgacaacagcagcctctccgacgacaaaaaagccaacgtcaggaagagcctcagcaaattcaacgccctgctgaagaccaagaggctcggatactttggcctggaggaacccaagaccaaggacaacagagtgagccaggcctataagaaaagggtgtaccacatgctggccatcgtgggccagatcagacagtgcgtgttccatgacaagtccggcgccaagagattcgacctgtactccttcattaacaacatcgaccctgagtacagggatacactggattacctcgtggaggagaggctgaagagcatcaacaaagactttattgaggacaacaaagtcaacatcagcctgctgatcgatatgatgaagggctacgaagctgacgacatcatcaggctgtactatgatttcattgtcctgaagagccagaagaacctgggattctccattaagaaactgagagaaaagatgctcgacgagtacggcttcaggttcaaggacaagcagtatgacagcgtgagatccaagatgtacaagctgatggattttctcctgttttgcaactattacaggaacgacatcgccgccggcgaatccctggtcaggaaactgagattcagcatgaccgacgacgagaaggaaggcatctacgccgacgaagccgctaagctgtggggaaaatttagaaatgacttcgagaacatcgctgaccacatgaacggcgatgtgatcaaggagctcggcaaggctgacatggatttcgacgagaagatcctggattccgagaagaagaatgccagcgatctgctgtacttcagcaagatgatttacatgctcacatattttctcgatggcaaggagatcaacgatctcctgaccacactgatcagcaagttcgacaacattaaagagttcctcaaaattatgaaatccagcgccgtggatgtcgagtgcgaactcaccgccggctacaagctcttcaacgacagccagaggatcaccaatgagctgttcattgtgaaaaatatcgctagcatgaggaaacccgccgcctccgctaaactgacaatgtttagagatgccctcaccatcctgggcatcgacgataagatcacagacgacagaattagcggaatcctgaagctcaaggaaaagggcaagggaatccatggcctcagaaatttcattaccaataacgtgatcgaaagcagcaggttcgtgtatctgatcaagtacgccaatgcccaaaagatcagggaggtggccaagaacgaaaaggtggtgatgttcgtgctgggcggcattcctgacacacagatcgaaaggtactacaagagctgtgtggagttccccgatatgaactccagcctgggcgtgaagagatccgaactggctaggatgatcaagaatattagcttcgacgacttcaagaacgtgaagcaacaggccaaaggaagggagaacgtcgccaaagagagagccaaggccgtgatcggactctacctgaccgtcatgtacctcctcgtgaagaacctggtgaacgtgaacgctagatacgtcatcgccatccattgcctcgagagggacttcggactgtacaaggagatcattcccgagctggccagcaaaaatctcaagaacgattacagaatcctgagccaaaccctgtgcgagctgtgtgacaagtcccccaacctgtttctgaagaagaatgaaaggctgagaaagtgcgtcgaagtcgacatcaacaacgctgacagctccatgaccaggaaatacaggaactgtatcgcccatctgaccgtggtgagggaactcaaggagtacatcggagatatctgcaccgtggactcctacttcagcatttatcactacgtgatgcagaggtgcattaccaagagagaaaatgacacaaagcaggaggagaagattaagtacgaggacgatctgctgaaaaaccacggatacaccaaggatttcgtcaaggccctcaatagccccttcggctacaatatccctaggtttaaaaacctgagcatcgagcagctgtttgacagaaatgaatacctgacagagaagggatccggacctaagaaaaagaggaaggtggcggccgct

SEQ ID NO: 122 - DNA, 2803 bp, Artificial Sequence
  Human codon-optimized Ruminococcus flavefaciens FD1 nCas1
aagaaaaaaatgagcctcagagagaagagggaagccgagaaacaagccaaaaaagccgcctacagcgctgcctccaaaaacacagatagcaaacctgctgagaagaaggccgagacacccaagcctgctgagattatttccgacaactccagaaacaaaaccgccgtcaaggccgccggcctgaaatccacaattatctccggcgataagctgtacatgaccagcttcggaaagggcaacgccgccgtgatcgagcagaaaattgatattaatgattactccttctccgccatgaaggatacccccagcctggaagtggacaaggccgagagcaaggagatctccttctccagccaccacccttttgtcaaaaatgataaactgaccacctataatcccctgtacggcggaaaagataaccccgaaaagcccgtgggcagagatatgctcggcctcaaagacaagctcgaggagaggtacttcggatgcaccttcaatgacaacctgcacattcagattatctataacatcctcgacattgagaaaattctggccgtgcactccgccaacattaccacagctctggaccacatggtggacgaggacgatgagaagtacctcaatagcgattacattggctacatgaacaccatcaacacctatgatgtgttcatggacccctccaaaaattcctccctctcccccaaggacaggaagaacattgataacagcagggccaagtttgagaagctcctgtccacaaagaggctcggctactttggctttgactacgatgccaacggcaaggataagaagaaaaacgaggagatcaagaaaaggctctatcacctgacagcctttgccggccagctcaggcagtggtccttccatagcgccggcaattatcccagaacctggctctacaagctcgatagcctggacaaagagtatctcgacaccctggaccattattttgataagagattcaacgatattaatgacgatttcgtcaccaagaacgccacaaacctgtacatcctgaaggaggtcttccccgaggctaatttcaaggatatcgccgatctctactacgatttcattgtcatcaaaagccataagaatatgggattttccatcaagaagctgagggagaagatgctggagtgcgatggagctgatagaatcaaggaacaggacatggactccgtgaggagcaagctgtataagctgatcgatttttgcattttcaaatactaccacgagttccctgagctgagcgagaagaacgtcgacatcctcagggctgccgtgagcgataccaaaaaggacaacctgtatagcgacgaggccgctaggctctggagcatcttcaaggaaaagttcctgggcttctgcgacaagattgtggtgtgggtgaccggcgagcacgagaaagacatcacctccgtgattgacaaggacgcttacaggaacaggtccaacgtgagctacttttccaagctgatgtacgccatgtgtttcttcctggatggaaaggaaattaacgatctgctgaccacactgatcaacaaattcgacaacattgccaaccagatcaagaccgccaaggagctcggcattaacaccgccttcgtgaaaaactacgattttttcaaccacagcgaaaagtacgtggacgagctgaacattgtgaaaaacatcgccaggatgaaaaagccctccagcaacgccaagaaggccatgtaccatgacgccctgacaatcctgggcatccccgaggatatggacgagaaggccctggatgaggagctcgatctcatcctggaaaagaagaccgatcccgtgaccggaaagcccctcaaaggcaaaaatcccctgaggaattttatcgctaataatgtgattgagaatagcaggttcatttacctgattaaattttgcaaccctgagaatgtcaggaaaatcgtgaacaacacaaaggtgaccgagttcgtgctcaagaggatccccgatgcccagatcgagaggtactacaagagctgtaccgattccgagatgaaccctcccacagaaaagaagatcaccgagctggccggcaagctgaaagatatgaattttggaaacttcaggaacgtgaggcagtccgccaaggaaaacatggagaaagagaggttcaaggccgtcattggcctgtacctcaccgtcgtctacagagtggtcaaaaacctggtggacgtcaatagcaggtacatcatggccttccatagcctggagagagattcccagctgtacaacgtgagcgtcgataatgattacctggccctcaccgacaccctggtcaaggagggcgacaacagcaggtccaggtacctggccggaaataaaaggctgagggattgcgtgaagcaagacatcgacaatgccaaaaagtggttcgtctccgacaagtacaactccattacaaagtacaggaacaacgtggcccacctgaccgccgtgagaaactgcgccgagttcatcggcgacattaccaagatcgactcctacttcgccctctaccactacctcattcagagacagctggctaagggcctcgatcatgagaggtccggattcgacaggaattacccccagtacgcccctctgttcaaatggcacacctacgtgaaggatgtcgtcaaggccctgaacgcccccttcggatacaatatccctaggttcaagaatctgagcatcgacgccctctttgataggaatgaaatcaagaagaacgatggcgagaagaagtccgacgactgagcct

SEQ ID NO: 123 - DNA, 2799 bp, Artificial Sequence
  Human codon-optimized Ruminococcus flavefaciens FD1 nCas1 HEPN-/-
aagaaaaaaatgagcctcagagagaagagggaagccgagaaacaagccaaaaaagccgcctacagcgctgcctccaaaaacacagatagcaaacctgctgagaagaaggccgagacacccaagcctgctgagattatttccgacaactccagaaacaaaaccgccgtcaaggccgccggcctgaaatccacaattatctccggcgataagctgtacatgaccagcttcggaaagggcaacgccgccgtgatcgagcagaaaattgatattaatgattactccttctccgccatgaaggatacccccagcctggaagtggacaaggccgagagcaaggagatctccttctccagccaccacccttttgtcaaaaatgataaactgaccacctataatcccctgtacggcggaaaagataaccccgaaaagcccgtgggcagagatatgctcggcctcaaagacaagctcgaggagaggtacttcggatgcaccttcaatgacaacctgcacattcagattatctataacatcctcgacattgagaaaattctggccgtgcactccgccaacattaccacagctctggaccacatggtggacgaggacgatgagaagtacctcaatagcgattacattggctacatgaacaccatcaacacctatgatgtgttcatggacccctccaaaaattcctccctctcccccaaggacaggaagaacattgataacagcagggccaagtttgagaagctcctgtccacaaagaggctcggctactttggctttgactacgatgccaacggcaaggataagaagaaaaacgaggagatcaagaaaaggctctatcacctgacagcctttgccggccagctcgcgcagtggtccttcgctagcgccggcaattatcccagaacctggctctacaagctcgatagcctggacaaagagtatctcgacaccctggaccattattttgataagagattcaacgatattaatgacgatttcgtcaccaagaacgccacaaacctgtacatcctgaaggaggtcttccccgaggctaatttcaaggatatcgccgatctctactacgatttcattgtcatcaaaagccataagaatatgggattttccatcaagaagctgagggagaagatgctggagtgcgatggagctgatagaatcaaggaacaggacatggactccgtgaggagcaagctgtataagctgatcgatttttgcattttcaaatactaccacgagttccctgagctgagcgagaagaacgtcgacatcctcagggctgccgtgagcgataccaaaaaggacaacctgtatagcgacgaggccgctaggctctggagcatcttcaaggaaaagttcctgggcttctgcgacaagattgtggtgtgggtgaccggcgagcacgagaaagacatcacctccgtgattgacaaggacgcttacaggaacaggtccaacgtgagctacttttccaagctgatgtacgccatgtgtttcttcctggatggaaaggaaattaacgatctgctgaccacactgatcaacaaattcgacaacattgccaaccagatcaagaccgccaaggagctcggcattaacaccgccttcgtgaaaaactacgattttttcaaccacagcgaaaagtacgtggacgagctgaacattgtgaaaaacatcgccaggatgaaaaagccctccagcaacgccaagaaggccatgtaccatgacgccctgacaatcctgggcatccccgaggatatggacgagaaggccctggatgaggagctcgatctcatcctggaaaagaagaccgatcccgtgaccggaaagcccctcaaaggcaaaaatcccctgaggaattttatcgctaataatgtgattgagaatagcaggttcatttacctgattaaattttgcaaccctgagaatgtcaggaaaatcgtgaacaacacaaaggtgaccgagttcgtgctcaagaggatccccgatgcccagatcgagaggtactacaagagctgtaccgattccgagatgaaccctcccacagaaaagaagatcaccgagctggccggcaagctgaaagatatgaattttggaaacttcaggaacgtgaggcagtccgccaaggaaaacatggagaaagagaggttcaaggccgtcattggcctgtacctcaccgtcgtctacagagtggtcaaaaacctggtggacgtcaatagcaggtacatcatggccttccatagcctggagagagattcccagctgtacaacgtgagcgtcgataatgattacctggccctcaccgacaccctggtcaaggagggcgacaacagcaggtccaggtacctggccggaaataaaaggctgagggattgcgtgaagcaagacatcgacaatgccaaaaagtggttcgtctccgacaagtacaactccattacaaagtacgcgaacaacgtggccgccctgaccgccgtgagaaactgcgccgagttcatcggcgacattaccaagatcgactcctacttcgccctctaccactacctcattcagagacagctggctaagggcctcgatcatgagaggtccggattcgacaggaattacccccagtacgcccctctgttcaaatggcacacctacgtgaaggatgtcgtcaaggccctgaacgcccccttcggatacaatatccctaggttcaagaatctgagcatcgacgccctctttgataggaatgaaatcaagaagaacgatggcgagaagaagtccgacgactga

SEQ ID NO: 124 - DNA, 2757 bp, Artificial Sequence
  Ruminococcus bicirculans nCas1 sequence
atggcaaaaaagaataaaatgaagcctagagagctgcgtgaggctcagaaaaaagccagacagctcaaagcggctgagataaataataacgctgttcctgcaatcgctgccatgcctgctgcagaggctgctgcacctgcggcagagaagaaaaaatcctccgtaaaggcggcaggaatgaagtctattcttgtcagtgaaaataaaatgtacataacctctttcggcaagggcaattctgcggtgcttgaatatgaggtggataataatgactacaacaaaactcagctttcctcaaaggacaacagtaatatcgagctctgtgatgtaggcaaagtaaacatcactttttcgagcagacgtggctttgagagcggtgtggagataaacacttcaaaccctactcacagaagcggtgaaagctcgtctgtaagaggggatatgctggggcttaaatcggagcttgaaaagcgctttttcggcaagaattttgatgataatatacatatccagcttatttacaacattctggatatcgaaaagatacttgcagtgtatgtgacgaatatcgtttatgcactgaacaatatgcttggggaaggcgatgagagcaattacgatttcatggggtatctttccacatttaacacttataaagtttttactaatcctaatggcagcactttatccgacgataagaaagagaatatcagaaaaagtcttagcaaattcaatgccctgctgaaaactaagcgtcttggctatttcggccttgaagagccaaagacaaaggatacaagagcttcggaagcatacaaaaagcgtgtttatcatatgcttgcaattgtggggcagataagacagtgtgtttttcatgataaatcgggtgcaaaaagatttgacctttacagttttattaacaatattgatcccgaatacagagaaacccttgactatcttgtagatgagagatttgattctataaataagggctttatccagggcaacaaggtcaatatcagcttgcttattgatatgatgaaaggctatgaggctgatgatatcatacgcctttattacgatttcattgtgcttaaatctcagaaaaatctcggtttttctatcaaaaagcttcgtgagaaaatgctggacgaatacggcttcagatttaaggacaagcaatatgactctgtgcgctcaaagatgtacaagcttatggattttctgcttttctgcaactactacagaaatgacattgccgcaggcgaatctcttgtgcgcaaactgcgtttttcaatgaccgatgatgaaaaagaggggatatatgctgatgaagcggcaaagctttggggcaaattcaggaatgattttgaaaatatcgccgaccacatgaacggtgacgttatcaaggagcttggcaaggctgacatggattttgatgagaaaattcttgacagcgaaaagaagaatgcgtctgaccttttgtatttctccaaaatgatatatatgctcacatattttcttgacggcaaggagataaacgaccttcttacaacgcttatcagcaagtttgataacatcaaggagtttttgaagataatgaaaagctctgctgttgatgttgagtgtgaacttacggcgggctacaagctgttcaatgacagccagaggataaccaacgagctttttatcgtaaagaacattgcttccatgagaaagcctgcggcttcggcgaagcttacgatgttccgtgacgcactgactatactcggtatagacgacaagatcacggacgataggataagcgagattctaaaacttaaagaaaaaggcaagggcatacatggcctgagaaatttcataacaaacaatgttatcgagtcctctcggtttgtataccttatcaagtatgcgaacgctcagaagataagagaagtggctaagaatgagaaagttgtcatgtttgttcttgggggtatccctgacacgcagatagagcgttattacaagagttgtgtggaatttcctgacatgaacagttctttgggagtaaagcgcagtgagcttgcgagaatgataaagaacatcagctttgatgatttcaaaaatgtgaaacagcaggcaaagggcagagaaaacgtggctaaggagagggcaaaggctgttatcgggctttatcttacggtcatgtatctgctggtgaaaaatcttgtgaatgtcaatgcaaggtatgttattgcgatacactgccttgaacgtgattttgggctgtataaggagataattcctgagttggcttcaaagaacttgaaaaatgactacaggatactttcacagacgctttgtgaactttgtgataagtcgccgaatttgttcttgaaaaagaacgagcggctgcgcaagtgcgttgaagttgatatcaataatgcagacagcagcatgacaagaaaataccgcaactgtattgctcatcttactgtagttcgtgaactgaaagaatacataggagatatttgtacagtggattcttacttctccatttatcattatgttatgcagcgctgtatcacgaaaagggaaaatgacacaaagcaagaagagaaaataaagtatgaggacgatcttttaaaaaatcacggctatacgaaagactttgtaaaggctctcaactcgccgtttggatacaacattccgaggtttaaaaatctttcaattgagcagttgtttgacagaaatgaatatcttactgaaaagtag

SEQ ID NO: 125 - DNA, 2865 bp, Artificial Sequence
  Eubacterium siraeum nCas1 sequence
atgggtaagaaaatacacgcacgagatctcagagaacaaagaaagaccgatagaacggaaaaatttgcagatcagaacaaaaaacgtgaagcagagagggcagttccgaaaaaagacgcagccgtttctgtaaaatcagtttcttctgtttcatcaaaaaaagacaatgtaacaaaatctatggctaaagccgcaggcgtgaagtcggtttttgctgtaggaaatactgtttatatgacttcattcggcagaggaaacgatgctgtacttgagcagaaaatagtcgatacatcgcacgaaccgctgaatattgacgatcctgcatatcagttgaacgttgtcacaatgaacggttattcggttaccggtcacagaggtgaaacggtatctgccgtaacggataatccgctgcgccgttttaacggaagaaagaaagatgaaccggaacagtctgtgcctacggatatgctgtgcctgaaaccgactcttgaaaagaaattcttcggcaaagaattcgatgataatatacatatccagcttatttacaatattcttgacattgaaaaaatactggcggtttattcgaccaacgctatttacgcattgaataatatgagtgctgacgaaaatatcgaaaacagcgatttcttcatgaaacgtaccaccgatgaaacctttgacgattttgaaaagaaaaaggagagtacaaacagtcgagagaaagccgattttgacgcatttgaaaaattcatcggcaattacaggctggcttattttgccgatgcattttatgtaaataaaaagaatcccaaaggtaaagcaaaaaatgttctgcgtgaggataaagaactttactccgtgctcactctgatcggtaaactgcgtcattggtgtgttcacagtgaggagggcagagcagaattctggctgtataagctcgatgaacttaaagatgatttcaaaaatgtactcgacgttgtttataaccgtcctgttgaagaaataaacaaccgctttatagaaaacaataaggtaaacatacagatactgggctcggtatacaagaacaccgatattgccgaacttgtaaggtcatattacgaatttcttatcacaaagaagtataaaaatatgggcttttcaataaagaagctccgtgagagtatgctcgaaggtaaaggttacgccgataaagaatatgattctgtaaggaataagctgtatcagatgacggatttcatcttatacacaggatatatcaacgaagacagcgatagagccgacgatcttgtgaacactttgagaagttcgctcaaagaggatgataagacaaccgtatattgcaaggaagcggattatctgtggaaaaaataccgtgaatccataagagaggttgccgatgcgcttgatggcgataacattaaaaagctgagcaaatcgaatattgaaattcaggaagacaagctgagaaaatgttttatcagctatgccgacagcgtatcggaatttaccaagcttatttatctgctgacaagatttttaagcggtaaggagatcaacgatcttgtcacaacgctgataaacaagtttgacaatatcagaagcttccttgaaataatggacgagcttgggcttgacaggaccttcaccgccgagtacagcttctttgaaggcagtacaaagtatcttgccgagcttgtcgagcttaacagctttgtgaaatcgtgttcgtttgatataaacgcaaaaagaacaatgtatcgcgatgcgctggatattctcggcattgaatcggataagaccgaagaagatattgagaagatgatcgataatatccttcagatcgacgcaaacggtgataaaaagctcaagaaaaacaacggtctgagaaatttcattgcaagtaacgttatagattcaaaccgattcaagtaccttgtgcggtacggaaatccaaagaagattcgtgaaacggcaaaatgcaagcccgctgtaaggtttgtgctgaatgagatcccggacgcacagatcgaaagatattatgaggcttgttgcccaaaaaatacagctttatgctctgcaaataagagacgtgagaaactggctgatatgatagctgaaataaagtttgagaatttttcggatgccggcaattatcagaaagcaaatgtcacatcaagaacgtctgaagctgaaatcaagcggaagaatcaggctataatccgtctttatcttaccgttatgtacattatgctgaagaaccttgtaaatgtgaacgccagatacgttatcgctttccattgcgttgaaagggatacgaagctgtatgcggaaagcggtctggaagtcggtaatatagaaaaaaacaagacaaatcttactatggctgtaatgggagtcaagctcgaaaacggaatcataaaaacggaatttgacaagagctttgcagaaaatgccgcaaacagatatctcaggaatgcacgctggtacaagctgatactggataatttaaagaagtcggaaagagcggttgtcaatgagttcagaaatactgtctgccatctgaatgcgataaggaatatcaatatcaatatcaaggaaataaaagaggtcgagaactactttgctctgtaccactacctcattcagaaacatctcgaaaatcgttttgccgataaaaaagtagaaagagacaccggcgattttataagcaagctcgaagaacacaagacttactgcaaggactttgtaaaagcatattgtacgcctttcggatataaccttgtgagatataaaaaccttacgatagacgggctgtttgataagaattaccccggaaaagacgattctgatgaacagaaataa

SEQ ID NO: 126 - DNA, 2799 bp, Artificial Sequence
  Ruminococcus flavefaciens FD1 nCas1 sequence
atgaaaaagaaaatgtctctccgtgaaaagcgtgaagccgagaaacaggctaaaaaagctgcatattcagcagcttcaaaaaatacagattctaagcctgcggaaaagaaagcagaaactccaaagcctgcggagattatttccgataattccagaaataagaccgctgtaaaggcggctggtctgaaatcaacaattatcagcggcgataagctgtatatgacatctttcggcaagggtaacgctgctgttattgagcagaaaatagatatcaatgattattctttttcagctatgaaagatactccgtcgcttgaagttgataaagcagaatcaaaagagatctctttttcaagtcaccatccttttgtaaagaatgataagctgacaacatataaccctttatacggcggcaaggataaccccgaaaagcctgtcggcagggatatgctcggcttaaaagataagcttgaagaacgctatttcggatgtacattcaatgataatcttcacatccagattatctataacatacttgacatcgagaagattttagctgttcattctgcaaatatcacaactgcgcttgaccacatggttgatgaagacgatgaaaaatatcttaacagcgattatatcggctacatgaataccataaatacatatgacgtgtttatggatccttcaaagaattcttcattaagccctaaagatagaaagaatattgacaacagccgtgcaaaatttgagaaactgctttcaactaagcgccttggctattttggatttgactatgatgcaaacggtaaggacaagaaaaagaacgaggaaataaaaaagcgtttatatcatctcacagcttttgcaggtcagctccgtcagtggagttttcatagtgctggcaattatccgagaacatggctttacaagctcgattcactggataaggaatatcttgatactcttgaccattacttcgataaacgttttaacgatataaacgatgatttcgtaactaagaatgctaccaatctctatattctgaaagaagtatttcccgaagcaaacttcaaggatattgccgatctttattacgatttcatagttataaagtcgcacaaaaatatgggattctccataaaaaagctgagggagaagatgcttgaatgtgatggtgcagacaggataaaagaacaggatatggactctgttcgctcaaagctgtataagctcatagacttttgcattttcaagtattatcacgaatttcctgaacttagtgaaaagaatgtggatatactcagagcggctgtatccgatacaaaaaaagataacctttattctgatgaggctgcacgtttatggagcatatttaaagaaaaattcctcggcttctgtgataagatagttgtatgggtaacaggagagcatgagaaagatatcacatccgttattgataaggatgcttacaggaacaggagcaatgtttcatatttctcaaagctgatgtatgcaatgtgctttttccttgacggaaaagagataaatgaccttctcactactcttatcaacaaattcgataatatcgctaaccagataaaaacagccaaagaacttggcattaatactgcttttgtaaagaattacgatttcttcaatcacagcgagaaatatgtcgatgaactgaacatcgtcaagaatattgcaagaatgaagaagccttcaagtaatgccaaaaaagctatgtatcatgatgcgcttactattctcggaatacctgaggatatggatgaaaaagctcttgatgaggaactggatttaattcttgaaaaaaagacagacccagtaactggcaagccactgaaaggtaagaatcctttacgtaattttatcgcaaacaatgtgatagagaattcaagattcatatatcttatcaagttctgcaatcctgagaatgtacgtaaaatcgtgaataatacaaaggtcactgagtttgtgttaaagcgtattcccgatgctcagatcgaacgctattataagtcgtgtacagattctgaaatgaatccgcctactgaaaagaagatcaccgaacttgctggtaagttaaaggatatgaactttggcaacttccgaaatgtgagacagtctgctaaagagaatatggagaaggagcgcttcaaagctgttatagggctttatctcacggtagtatatcgtgttgtcaagaatcttgttgatgtaaactcacgatatatcatggcttttcattcgcttgaacgtgattcacaactgtataacgtatctgttgataatgattatcttgcacttaccgatactcttgttaaggagggagataattccagaagcagatatcttgcaggcaacaagcgtctgagagattgtgtgaagcaggatatcgataatgcaaaaaagtggtttgttagtgataagtacaatagcataaccaagtacaggaataacgttgcccatcttaccgctgtacgtaactgcgctgaattcatcggagatataacgaagatagactcctattttgcattgtatcattatctcattcagagacagcttgcgaaaggtcttgaccatgagcgaagtggctttgacagaaactatccacagtatgcaccgctgtttaagtggcatacgtatgtaaaggatgttgtcaaggctctgaatgctccatttggctacaatatccctcgtttcaagaatctcagcatagatgcactttttgaccgcaacgaaataaagaagaatgacggcgagaaaaaatccgatgat

SEQ ID NO: 127 - DNA, 2835 bp, Artificial Sequence
  Ruminococcus albus nCas1 sequence
atggcaaaaaaatcgaaaggtatgagccttagagaaaaacgtgaacttgaaaagcagaaaaggatacaaaaggcagctgtgaattcagttaatgatacacctgaaaaaacagaagaagcaaatgtcgtatctgtaaatgtcaggacatcggctgagaataagcatagtaaaaaatctgctgccaaagctttgggactgaaatccgggctggttatcggtgatgagctgtaccttacttcattcggcagaggtaacgaagcaaagcttgaaaagaagatatccggtgacactgtcgaaaaacttggcattggtgcttttgaagtcgccgaacgtgacgaatcaacgcttaccctcgaaagtggcaggataaaggacaagaccgccagacccaaagaccccagacatataaccgtcgatacacaaggtaaattcaaggaagatatgcttgggatacgcagtgtactggagaaaaagatatttggcaaaacatttgatgataatatccatgttcagcttgcgtacaatatcctggatgtcgaaaagataatggcacagtatgtcagcgatatcgtatatatgctgcataatactgataaaacagaaagaaacgataatcttatggggtatatgagcatcaggaatacctataagacattttgtgatacgtcaaatcttcccgatgatacaaaacaaaaagttgaaaatcagaagagagagtttgacaagatcataaaaagcggcagacttgggtatttcggcgaagcttttatggtaaacagcggcaatagtaccaagcttagacccgagaaagagatatatcatatctttgcgcttatggcgagcctgaggcagagttactttcacggatatgtaaaagataccgattatcagggaaccacatgggcatatactcttgaggacaagctgaaaggtccgagccatgagttcagggaaaccattgataagatatttgatgagggattcagcaagatcagcaaggactttggcaagatgaacaaggtcaaccttcagatacttgaacagatgattggtgaactgtatggcagtatagaacgacaaaacctcacttgcgattactatgacttcattcaactgaaaaagcataagtatcttggattttctataaagcgtcttagagagaccatgcttgaaacaacaccggctgaatgttataaagctgaatgctataacagcgagcgtcaaaagctgtataagctgatagatttcctgatatatgatctttactataaccgtaagcctgcacgcatcgaagaaatcgtggacaagctgagggaatctgtgaacgacgaagagaaagaatccatatattcagttgaggcgaagtatgtctatgaatcacttagcaaagttctggataaatcgctgaaaaacagtgtgtctggtgaaacgataaaggatctccaaaagagatatgatgacgaaacagcaaacaggatctgggatatctcacagcacagtataagtggaaatgtcaactgtttctgcaagctaatttatattatgaccctgatgcttgacggcaaggagataaatgatctgctgacaacgctggtaaacaagttcgataacatagcatcatttatagatgttatggacgaacttggcttggagcatagttttacagataactataaaatgtttgccgacagcaaggctatatgccttgatctgcagttcataaacagttttgcacgtatgtcaaagatcgatgatgagaagtcaaaaagacagcttttccgtgatgcgcttgtcatactggatatcggtaataaagatgagacttggataaataattatctggattctgatattttcaaactggacaaagaaggtaacaagttaaagggcgcaaggcatgatttcaggaactttatagccaataatgttataaagtcatcacgtttcaaatacctagtaaaatacagcagtgccgatggtatgataaagctgaaaacgaatgaaaagctgataggctttgttctggataagcttccagaaacgcagatagaccgctactatgaatcatgcggacttgacaatgcggtagtagataagaaagtcaggatagaaaagctatcggggcttatcagagatatgaagttcgatgatttcagcggtgtcaaaacctcaaacaaagcaggagataatgacaaacaggataaggcgaaatatcaggcgataataagcctgtacctcatggtgctgtatcagatagtcaagaacatgatatatgtcaactcacgttatgttatcgctttccattgtcttgaacgtgactttggtatgtatggaaaagattttggaaagtattatcaaggctgccgaaaacttacagatcattttattgaagaaaagtacatgaaagagggtaaacttggctgcaataaaaaagtcggcagatatctgaaaaataatatttcctgctgcactgatggactgataaatacctaccgtaatcaggttgatcactttgcagtggtaaggaagataggcaactatgcggcatatatcaagagtatcggttcgtggtttgaactttatcactatgtaatacagaggatagtttttgacgaatacagatttgcacttaacaacactgaaagcaactataagaacagcatcatcaagcaccatacctactgtaaggatatggtcaaggcactgaacacacctttcggttatgacctgccgagatacaagaatctttctatcggtgatctgtttgatcgcaataattatctgaataaaacaaaagagtcaatagatgcaaatagctctattgacagtcagtga

SEQ ID NO: 128 - DNA, 2904 bp, Artificial Sequence
  Ruminococcus flavefaciens XPD nCas1 sequence
atgatcgaaaagaagaagtcatttgcaaagggcatgggagtaaaatcaacacttgtatccggttcaaaggtatacatgacgacgttcgcagaaggaagcgatgccagacttgaaaagatcgttgaaggcgattctatcagatctgtcaacgaaggagaagcgttctcagctgaaatggctgataagaatgcaggctacaagatcggtaacgcaaagttcagccacccaaagggctatgctgtagttgcaaacaaccccttatacaccggaccggtacagcaggatatgctcggtctgaaggaaacgcttgaaaagagatattttggagagtctgccgacggaaatgataatatctgtattcaggtcatccataatatcctcgatatcgaaaagatcctcgctgaatatataaccaatgctgcttatgcggtaaacaatatttccggtcttgataaggatatcatcggttttggtaagttcagtacggtctatacttatgatgagttcaaggatcctgaacatcacagagcagctttcaacaataacgataagttaattaatgccatcaaggcacagtatgatgaatttgacaatttccttgataatcctcgtctcggctactttggacaggcttttttcagtaaggaaggcagaaattacattatcaattacggcaacgagtgttatgatattcttgctttactcagcggattgcgtcactgggtagtacataataatgaggaagaatcaaggatttcccgtacatggctttataatctcgacaagaatcttgacaacgaatatatctctactctcaattatctgtatgatagaattacaaacgaattaacaaattccttctcaaagaatagtgcagccaacgtaaactatatcgctgaaacccttggtattaatcctgctgaatttgcagagcagtatttcagattcagtatcatgaaggaacagaagaatctcggtttcaatattactaagctgagagaagtaatgcttgacagaaaggatatgtctgagatccgtaaaaatcataaggtctttgattcaatccgtactaaggtctatactatgatggatttcgttatctacagatattacattgaagaggatgcaaaggttgctgctgccaacaagtctctgccggataacgaaaaaagcctcagtgaaaaggatatctttgttataaatctcagaggaagctttaacgatgatcagaaggatgccctttattatgatgaggccaatcgtatttggagaaagctcgaaaacattatgcacaatatcaaggaattcagaggcaataagacacgtgaatacaagaagaaggatgctccaagactccccagaattcttcctgccggaagggatgtttccgcgttctcaaagttgatgtacgctcttaccatgttccttgatggtaaggagatcaatgatcttctcaccacgctcatcaataagttcgataacatccagagtttcctcaaggtaatgcctcttatcggagtgaatgcaaagtttgttgaggaatatgccttcttcaaggacagcgcaaagattgctgacgaactcaggctgattaagagctttgccagaatgggagaacctatcgcagatgcaagacgtgctatgtatatcgatgctatcaggattctcggaacaaacctcagctatgatgagcttaaggcccttgccgatactttttcgcttgatgaaaacggcaacaagcttaagaagggcaagcacggcatgagaaacttcatcattaataatgtaatcagtaacaagcgcttccattatctcattcgttacggtgatcctgcacatctccatgagatcgccaagaatgaagctgttgtaaagttcgtcctcggcaggatagctgatatccagaagaagcagggacagaacggaaagaatcagatcgacaggtactatgagacctgtatcggcaaggacaagggcaagtctgtctccgaaaaggttgatgccctcacaaagattatcaccggtatgaactacgatcagttcgataagaagagaagcgttattgaggatactggaagagaaaacgctgagagagaaaagttcaagaagatcatcagcctctatcttactgtcatttatcacatccttaagaatattgttaatatcaatgcgcgttacgttatcggcttccattgcgttgagcgtgatgcacagctctataaggaaaagggctatgatatcaacctcaagaagctcgaagaaaaggggttttcatcagtcacaaagctgtgtgcaggtattgatgagactgctcctgacaagcgtaaggatgttgaaaaggaaatggctgagcgtgcaaaggaatctatcgatagccttgaatctgcaaatcctaagctttacgcaaactatatcaagtattctgacgagaagaaggctgaggaatttactagacagatcaaccgtgagaaggcaaagaccgctctgaatgcatatctcagaaatactaagtggaatgtgataatcagggaagatcttcttagaatcgataataagacatgtacgctctttagaaataaggccgttcatcttgaagttgcaagatatgttcatgcatatatcaacgatattgccgaagtaaacagctatttccagctttatcattacatcatgcagagaatcatcatgaacgaaagatatgaaaagtcttctggaaaggtaagcgaatacttcgatgctgtgaacgatgaaaagaagtacaacgacaggcttctgaagctgttgtgcgttccatttggttactgcatcccgagattcaagaatctctccattgaagctttgttcgacaggaacgaagcagctaagtttgacaaggaaaagaagaaagtatcaggtaattcatag

SEQ ID NO: 129 - DNA, 36 bp, Artificial Sequence
  Consensus DR
gaactacacccgtgcaaaaatgcaggggtctaaaac

SEQ ID NO: 130 - DNA, 36 bp, Artificial Sequence
  Consensus DR
ctactacactggtgcaaatttgcactagtctaaaac

SEQ ID NO: 131 - DNA, 36 bp, Artificial Sequence
  Consensus DR
caaguaaaccccuaccaacuggucgggguuugaaac

SEQ ID NO: 132 - DNA, 36 bp, Artificial Sequence
  Consensus DR
cuacuacacuggugcgaauuugcacuagucuaaaac

SEQ ID NO: 133 - DNA, 36 bp, Artificial Sequence
  Consensus DR
gaacuauaguagugugaauuuacacuacucuaaaac

SEQ ID NO: 134 - DNA, 36 bp, Artificial Sequence
  Consensus DR
cuacuauacuagugugauuuuacacuagucuaaaac

SEQ ID NO: 135 - DNA, 36 bp, Artificial Sequence
  Consensus DR
gaccaacaccucugcaaaacugcaggggucuaaaac

SEQ ID NO: 136 - DNA, 36 bp, Artificial Sequence
  Consensus DR
gcacuacaccccccugaaacaugaggggucuaaaac

SEQ ID NO: 137 - DNA, 36 bp, Artificial Sequence
  Consensus DR
gcactacacccccctgaaacatgaggggtctaaaac

SEQ ID NO: 138 - protein, 966 aa, Artificial Sequence
  50% consensus sequence for 7 full-length nCas1 orthologues
  misc_feature (2)..(4): Xaa can be any naturally occurring amino acid
  misc_feature (13)..(13): Xaa can be any naturally occurring amino acid
  misc_feature (22)..(23): Xaa can be any naturally occurring amino acid
  misc_feature (25)..(25): Xaa can be any naturally occurring amino acid
  misc_feature (32)..(33): Xaa can be any naturally occurring amino acid
  misc_feature (39)..(40): Xaa can be any naturally occurring amino acid
  misc_feature (43)..(44): Xaa can be any naturally occurring amino acid
  misc_feature (46)..(56): Xaa can be any naturally occurring amino acid
  misc_feature (60)..(60): Xaa can be any naturally occurring amino acid
  misc_feature (69)..(70): Xaa can be any naturally occurring amino acid
  misc_feature (72)..(72): Xaa can be any naturally occurring amino acid
  misc_feature (74)..(76): Xaa can be any naturally occurring amino acid
  misc_feature (83)..(83): Xaa can be any naturally occurring amino acid
  misc_feature (86)..(86): Xaa can be any naturally occurring amino acid
  misc_feature (88)..(88): Xaa can be any naturally occurring amino acid
  misc_feature (94)..(95): Xaa can be any naturally occurring amino acid
  misc_feature (97)..(108): Xaa can be any naturally occurring amino acid
  misc_feature (110)..(135): Xaa can be any naturally occurring amino acid
  misc_feature (139)..(147): Xaa can be any naturally occurring amino acid
  misc_feature (149)..(150): Xaa can be any naturally occurring amino acid
  misc_feature (157)..(158): Xaa can be any naturally occurring amino acid
  misc_feature (162)..(162): Xaa can be any naturally occurring amino acid
  misc_feature (167)..(167): Xaa can be any naturally occurring amino acid
  misc_feature (191)..(192): Xaa can be any naturally occurring amino acid
  misc_feature (201)..(209): Xaa can be any naturally occurring amino acid
  misc_feature (211)..(211): Xaa can be any naturally occurring amino acid
  misc_feature (213)..(214): Xaa can be any naturally occurring amino acid
  misc_feature (216)..(217): Xaa can be any naturally occurring amino acid
  misc_feature (220)..(221): Xaa can be any naturally occurring amino acid
  misc_feature (225)..(225): Xaa can be any naturally occurring amino acid
  misc_feature (227)..(228): Xaa can be any naturally occurring amino acid
  misc_feature (230)..(242): Xaa can be any naturally occurring amino acid
  misc_feature (244)..(249): Xaa can be any naturally occurring amino acid
  misc_feature (251)..(251): Xaa can be any naturally occurring amino acid
  misc_feature (253)..(257): Xaa can be any naturally occurring amino acid
  misc_feature (264)..(264): Xaa can be any naturally occurring amino acid
  misc_feature (267)..(270): Xaa can be any naturally occurring amino acid
  misc_feature (273)..(280): Xaa can be any naturally occurring amino acid
  misc_feature (283)..(283): Xaa can be any naturally occurring amino acid
  misc_feature (285)..(285): Xaa can be any naturally occurring amino acid
  misc_feature (290)..(292): Xaa can be any naturally occurring amino acid
  misc_feature (296)..(298): Xaa can be any naturally occurring amino acid
  misc_feature (300)..(310): Xaa can be any naturally occurring amino acid
  misc_feature (314)..(314): Xaa can be any naturally occurring amino acid
  misc_feature (316)..(318): Xaa can be any naturally occurring amino acid
  misc_feature (320)..(321): Xaa can be any naturally occurring amino acid
  misc_feature (323)..(325): Xaa can be any naturally occurring amino acid
  misc_feature (329)..(331): Xaa can be any naturally occurring amino acid
  misc_feature (333)..(337): Xaa can be any naturally occurring amino acid
  misc_feature (340)..(341): Xaa can be any naturally occurring amino acid
  misc_feature (343)..(345): Xaa can be any naturally occurring amino acid
  MISC_FEATURE (350)..(350): Xaa can be Ile or Leu
  misc_feature (351)..(352): Xaa can be any naturally occurring amino acid
  misc_feature (354)..(357): Xaa can be any naturally occurring amino acid
  misc_feature (359)..(364): Xaa can be any naturally occurring amino acid
  MISC_FEATURE (365)..(365): Xaa can be Ile or Leu
  misc_feature (366)..(368): Xaa can be any naturally occurring amino acid
  misc_feature (373)..(375): Xaa can be any naturally occurring amino acid
  misc_feature (377)..(378): Xaa can be any naturally occurring amino acid
  misc_feature (391)..(391): Xaa can be any naturally occurring amino acid
  misc_feature (394)..(397): Xaa can be any naturally occurring amino acid
  misc_feature (399)..(400): Xaa can be any naturally occurring amino acid
  MISC_FEATURE (401)..(401): Xaa can be Ile or Leu
  misc_feature (402)..(404): Xaa can be any naturally occurring amino acid
  misc_feature (411)..(411): Xaa can be any naturally occurring amino acid
  misc_feature (415)..(415): Xaa can be any naturally occurring amino acid
  misc_feature (417)..(417): Xaa can be any naturally occurring amino acid
  MISC_FEATURE (420)..(420): Xaa can be Ile or Leu
  misc_feature (423)..(424): Xaa can be any naturally occurring amino acid
  misc_feature (426)..(427): Xaa can be any naturally occurring amino acid
  misc_feature (429)..(433): Xaa can be any naturally occurring amino acid
  misc_feature (435)..(436): Xaa can be any naturally occurring amino acid
  misc_feature (438)..(439): Xaa can be any naturally occurring amino acid
  misc_feature (442)..(442): Xaa can be any naturally occurring amino acid
  misc_feature (444)..(445): Xaa can be any naturally occurring amino acid
  misc_feature (447)..(447): Xaa can be any naturally occurring amino acid
  misc_feature (450)..(452): Xaa can be any naturally occurring amino acid
  misc_feature (454)..(455): Xaa can be any naturally occurring amino acid
  misc_feature (458)..(459): Xaa can be any naturally occurring amino acid
  misc_feature (462)..(477): Xaa can be any naturally occurring amino acid
  misc_feature (479)..(480): Xaa can be any naturally occurring amino acid
  MISC_FEATURE (481)..(481): Xaa can be Ile or Leu
  misc_feature (483)..(485): Xaa can be any naturally occurring amino acid
  misc_feature (487)..(487): Xaa can be any naturally occurring amino acid
  misc_feature (489)..(489): Xaa can be any naturally occurring amino acid
  misc_feature (491)..(506): Xaa can be any naturally occurring amino acid
  misc_feature (509)..(510): Xaa can be any naturally occurring amino acid
  misc_feature (517)..(517): Xaa can be any naturally occurring amino acid
  misc_feature (520)..(520): Xaa can be any naturally occurring amino acid
  misc_feature (542)..(542): Xaa can be any naturally occurring amino acid
  misc_feature (546)..(546): Xaa can be any naturally occurring amino acid
  misc_feature (549)..(549): Xaa can be any naturally occurring amino acid
  misc_feature (554)..(556): Xaa can be any naturally occurring amino acid
  misc_feature (558)..(560): Xaa can be any naturally occurring amino acid
  misc_feature (562)..(563): Xaa can be any naturally occurring amino acid
  misc_feature (565)..(566): Xaa can be any naturally occurring amino acid
  misc_feature (568)..(569): Xaa can be any naturally occurring amino acid
  misc_feature (571)..(572): Xaa can be any naturally occurring amino acid
  misc_feature (575)..(577): Xaa can be any naturally occurring amino acid
  misc_feature (580)..(580): Xaa can be any naturally occurring amino acid
  misc_feature (584)..(584): Xaa can be any naturally occurring amino acid
  misc_feature (587)..(589): Xaa can be any naturally occurring amino acid
  misc_feature (593)..(593): Xaa can be any naturally occurring amino acid
  misc_feature (600)..(600): Xaa can be any naturally occurring amino acid
  misc_feature (605)..(612): Xaa can be any naturally occurring amino acid
  misc_feature (614)..(616): Xaa can be any naturally occurring amino acid
  misc_feature (618)..(623): Xaa can be any naturally occurring amino acid
  MISC_FEATURE (624)..(624): Xaa can be Ile or Leu
  misc_feature (626)..(629): Xaa can be any naturally occurring amino acid
  misc_feature (631)..(632): Xaa can be any naturally occurring amino acid
  misc_feature (634)..(636): Xaa can be any naturally occurring amino acid
  misc_feature (648)..(648): Xaa can be any naturally occurring amino acid
  misc_feature (650)..(650): Xaa can be any naturally occurring amino acid
  misc_feature (653)..(653): Xaa can be any naturally occurring amino acid
  misc_feature (656)..(656): Xaa can be any naturally occurring amino acid
  misc_feature (659)..(659): Xaa can be any naturally occurring amino acid
  misc_feature (662)..(664): Xaa can be any naturally occurring amino acid
  misc_feature (666)..(666): Xaa can be any naturally occurring amino acid
  MISC_FEATURE (667)..(667): Xaa can be Ile or Leu
  misc_feature (669)..(669): Xaa can be any naturally occurring amino acid
  misc_feature (673)..(675): Xaa can be any naturally occurring amino acid
  misc_feature (679)..(680): Xaa can be any naturally occurring amino acid
  misc_feature (684)..(684): Xaa can be any naturally occurring amino acid
  misc_feature (694)..(696): Xaa can be any naturally occurring amino acid
  misc_feature (698)..(706): Xaa can be any naturally occurring amino acid
  misc_feature (708)..(709): Xaa can be any naturally occurring amino acid
  misc_feature (711)..(713): Xaa can be any naturally occurring amino acid
  misc_feature (715)..(718): Xaa can be any naturally occurring amino acid
  misc_feature (720)..(720): Xaa can be any naturally occurring amino acid
  misc_feature (723)..(723): Xaa can be any naturally occurring amino acid
  misc_feature (726)..(726): Xaa can be any naturally occurring amino acid
  misc_feature (728)..(733): Xaa can be any naturally occurring amino acid
  misc_feature (735)..(738): Xaa can be any naturally occurring amino acid
  misc_feature (742)..(742): Xaa can be any naturally occurring amino acid
  misc_feature (745)..(745): Xaa can be any naturally occurring amino acid
  misc_feature (753)..(753): Xaa can be any naturally occurring amino acid
  misc_feature (755)..(756): Xaa can be any naturally occurring amino acid
  misc_feature (778)..(779): Xaa can be any naturally occurring amino acid
  misc_feature (782)..(797): Xaa can be any naturally occurring amino acid
  misc_feature (800)..(812): Xaa can be any naturally occurring amino acid
  misc_feature (816)..(852): Xaa can be any naturally occurring amino acid
  misc_feature (856)..(856): Xaa can be any naturally occurring amino acid
  misc_feature (858)..(858): Xaa can be any naturally occurring amino acid
  misc_feature (861)..(861): Xaa can be any naturally occurring amino acid
  misc_feature (863)..(863): Xaa can be any naturally occurring amino acid
  misc_feature (865)..(865): Xaa can be any naturally occurring amino acid
  MISC_FEATURE (866)..(866): Xaa can be Ile or Leu
  misc_feature (867)..(868): Xaa can be any naturally occurring amino acid
  misc_feature (871)..(871): Xaa can be any naturally occurring amino acid
  misc_feature (874)..(875): Xaa can be any naturally occurring amino acid
  misc_feature (877)..(877): Xaa can be any naturally occurring amino acid
  misc_feature (886)..(887): Xaa can be any naturally occurring amino acid
  misc_feature (890)..(890): Xaa can be any naturally occurring amino acid
  misc_feature (892)..(897): Xaa can be any naturally occurring amino acid
  misc_feature (899)..(912): Xaa can be any naturally occurring amino acid
  misc_feature (914)..(914): Xaa can be any naturally occurring amino acid
  misc_feature (917)..(917): Xaa can be any naturally occurring amino acid
  misc_feature (920)..(920): Xaa can be any naturally occurring amino acid
  misc_feature (926)..(926): Xaa can be any naturally occurring amino acid
  MISC_FEATURE (932)..(932): Xaa can be Ile or Leu
  misc_feature (941)..(942): Xaa can be any naturally occurring amino acid
  misc_feature (949)..(954): Xaa can be any naturally occurring amino acid
  misc_feature (956)..(957): Xaa can be any naturally occurring amino acid
  misc_feature (959)..(963): Xaa can be any naturally occurring amino acid
MXXXKKKMSLREXREAEKQARXXKXAAASKNXXAVPAKXXAAXXPXXXXXXXXXXXKKSXAKAAGLKSXXVXGXXXYMTSFGXGNXAXLEKKIXXBXXXXXXXXXXXXEXXXXXXXXXXXXXXXXXXXXXXXXXXNPLXXXXXXXXXVXXDMLGLKXXLEKXYFGKXFDDNIHIQLIYNILDIEKILAVYXXNIVYALNNXXXXXXXXXNXDXXGXXSTXXTYDXFXXPXXXXXXXXXXXXXIXXXXXXFXKXXXXXRLGYFGXAFXXXXKBXXXXXXXXKEXYXILALXXXLRQXXXHXXXXXXXXXXXWLYXLXXXLXXEXXXTLDXXXDXXXXXINXXFXXXNKVNXXXLXXXXGXXXXXXXXXXYYDFXXXKXXKNLGFSIKKLREXMLXXXXAXXXXXXZYDSVRXKLYXLXDFXIYXXYXXEXXXXXEXXVXXLRXSXXDXEKXXXYXXEAXXLWXXXXXXXXXXXXXXXXGXXXKXXXKXBXDXXXXXXXXXXXXXXXXBVXXFSKLIYXLTXFLDGKEINDLLTTLINKFDNIXSFLXVMXELGLXXXFXXXYXXFXXSXXIXXELXXXKNXARMXKPXXXAKRXMYRDALXILGIXXXXXXXXIXXXLXXXXXXXDXXXXKXXKXXXGLRNFIANNVIXSXRFXYLXRYXNPXXXRXXAXNEKXXXFVLXXIPDXQIERYYESCXXXBXXXXXXXXXIXXLXXXIXXXXFXBFXBVXQXXXXXXNXXXXKEKXKAXIGLYLTVXYXXVKNLVNVNARYVIAFHCLERDXXLYXXXXXXXXXXXXXXXXLTXXXXXXXXXXXXXYLKXXXXXXXXXXXXXXXXXXXXXXXXXXXXXXXXXXXXXYRNXVXHLXAXRXXXXYIXDIXXVXSYFALYHYXXQRXLXXXXXXKXXXXXXXXXXXXXXHXTYXKDXVKALNXPFGYNXPRYKNLSIXXLFDRNEXXXXXXEXXKXXXXXDSQ

SEQ ID NO: 139 - DNA, 2718 bp, Artificial Sequence
  Gut metagenome P1E0 nCas1 sequence
atggaacgtgaggtcaaaaagccccccaaaaaatccttggcaaaggcggcgggactgaagtccaccttcgtcatttcgccgcaggagaaggagctggccatgaccgccttcgggcggggcaacgacgcgctgctgcaaaagcgcatcgtggacggcgtggtgcgggatgtggccggagagaagcagcagtttcaggtgcagcggcaggacgagagccgtttccgactgcaaaacagccgccttgccgaccgcacggtaacggcggacgacccgctgcaccgcgcggagacgccccgccgccagccgctgggcgcaggtatggatcagctgcgccgcaaggcaatactggagcagaaatacttcggcaggacgtttgacgacaacatccacatccaactgatctacaacatattggacatccacaagatgctggctgtccccgccaaccacatcgtccacacgctgaatctgctgggcggatacggcgagacggactttgtggggatgctgcccgccgggctgccgtatgacaagctgagggtcgtgaaaaaaaagaacggcgacaccgtggacatcaaggcggatatcgccgcctatgccaagcggccgcagctggcctatctgggtgcggcgttctatgacgtgacccccggcaagagcaaaagggacgcggcgcggggcagagtcaagcgcgagcaggacgtgtatgccattctctcgctgatgagccttctgcggcagttctgcgcccacgacagtgtgcggatatggggacagaacaccaccgccgccctgtatcatttgcaggcgctgccgcaggacatgaaggatctgctggatgacggctggcgcagggcgctgggcggcgtcaacgaccatttcctcgacaccaacaaggtgaacctgctgaccctgttcgagtactacggcgccgagacgaagcaggcgcgggtggcgctgacgcaggacttctaccgcttcgtggtgctgaaggagcagaagaacatgggcttctccctgaggcgtctgcgggaggagctgctgaagctgccggacgccgcctacctcaccggtcaggagtacgactcggtgcggcagaagctgtatatgctgctggacttcctgctgtgccgcctctacgcgcaggagcgggccgaccgctgcgaggagctggtgtccgcgctgcgctgcgccttgtcggatgaggaaaaggacaccgtctatcaggcggaggccgccgcgctgtggcaggcgctgggcgacacgctgcgccggaagctgctgccgctgctgaaaggcaaaaagctgcaagacaaggacaagaagaagtcggatgagctggggctgtcccgtgacgtgctggatggtgtgctgttccgccccgcacagcagggcagccgcgccaacgccgactatttctgccggctgatgcacctgtccacatggttcatggacggcaaggagatcaacaccctgctgaccaccctcatcagcaagcttgagaatatcgacagcctgcggagcgtgctggagagcatgggactggcgtacagctttgtaccggcctacgccatgtttgaccacagccgctatatcgccggtcagctgcgggtggtcaacaacatcgcgcggatgcgtaagcctgccatcggcgccaagcgggagatgtaccgcgccgccgtggtgctgctgggcgtggacagcccggaggcagccgcggccatcaccgacgacctgctgcagatcgacccggaaacggggaaggtgcgcccccgcagcgacagcgcacgggacacgggtctgcggaacttcatcgccaacaacgtggtggaatcccgccgcttcacctacctgctgcgctacatgacgccggagcaggcgcgcgtgctggcgcagaacgaaaagctcatcgccttcgtgctgtccaccgtgcccgacacccagctggagcgctactgccgcacctgcgggcgggaggacatcaccggccgtccggcgcagatacgttacctgacggcgcagatcatgggcgtccggtatgagagcttcaccgatgtggagcagcgcgggagaggggataaccccaaaaaggagcggtacaaggctctcatcggcctgtacctgacggtgctgtatctggcggtgaagaatatggtcaactgcaacgcccgctacgtcatcgccttctactgccgtgaccgtgacacagcgctctatcagaaggaggtctgctggtacgatctggaggaggacaagaaaagcggcaagcagcggcaggtggaggactacaccgccctgacccgctattttgtgtcgcagggctatctgaaccgccatgcctgcggctatctgcgaagcaatatgaacggcatcagcaacagcctgctgaccgcctaccgcaacgcggtggatcacctgaacgcgatcccgccgctgggcagcctgtgccgggacatcggccgggtggacagctactttgccctgtaccactacgccgtgcagcagtatctgaacggcagatattacagaaagacgccccgcgagcaggagctgtttgccgccatggcgcagcataggacatggtgcagcgatctggtgaaggcactgaacaccccctttggctacaacctcgcccgctacaagaacctgtccattgacggtctgtttgaccgcgagggcgaccatgtggtgcgggaggacggcgaaaaaccggcggag

SEQ ID NO: 140 - DNA, 2835 bp, Artificial Sequence
  Anaerobic digester nCas1 sequence
aataacaaaagaaaaaccaaagctaaggcagctggactcaaatccgtttttttcgaccaaaagcaagctgttttgacgacttttgcaaaaggcaataattctcaaatcgaaaagaaggtcgtaaatagcgaggttaaggatttgcgacaaccacctgcttttgatctcgaacttaaagagaagactttttatatcagcggtaaaaacaacatcaatacctcaagagaaaacccattggcttccgcgtcgcttcctctaagcaagcgacaacgaattagagcagaaagaattaaacgggcgagagaggagaatcgcccctaccataacgtaaagagagtcggcgaagatgacttacgggcgaaagccgatttagagaagcactatttcggaaaagaatactctgacaatttaaaaattcaaataatctacaacattctcgatataaataagattatttccccctatattaatgatattgtttattctatgaataatcttgctcgtaacgacgagtatattgatggcaagattgatgttatcggcagtttaagctcgacgaccgattactcttcatttatgagtccaaataaggatttagaaaaagaaaaaaaattctcttttcatcgcgaaaactacaaaaaatttgtcgaagcctctaagccatatatgcgatattatggaaaagtttttattcgcgatgtcaaaaagagcaaactcagcaccggcaagggcgagaaaatcgaagtcatgtatcgctctgacgaggaaattttcacaatcttccaaatattaagttatgttcgtcaaagcatcatgcataatgatataggcaataagtcatcgattttagcaatcgaaaaatatcctgcccgctttgttgggttcttatcggacttgcttaaaacaaaaacaaatgatgtcaatagaatgttcatcgataataatagccagactaatttctgggtacttttttctatctttggtcttcaagatcatacgagcggcgcggacaaaatttgtcgtaatttttatgatttcgtcattaaagccgatagcaaaaacttaggtttttcacttaaaaaaatacgggaattaatgctcgatttgccaaatgccaatatgcttagagatcatcaatttgacactgttcgcagcaagttttacacactgcttgatttcatcatttaccagcactatttagaagaaaagtcgcgaatagacaatatggttgagaagttaagaatgactttaaaagaggaagaaaaggaagtgctttatgctgccgaggcaaaaatagtctggaacgccatcggggcgaaagtcataaacaagcttgttccgatgatgaatggcgacgcgctaaaagagattaaaaggaaaaacagagaccgcaaattgcctcaaagcgttatcgcaacggtccaagttaattcagacgctaacgtatttagtggcctgatatacttccttaccctctttttagacggcaaagaaattaatgaaatggtcagcaaccttattaccaaattcgaaaacattgatagtttactccatgttgatcgcgaaatttataaaagcgatgaaaaggatctcgatttagaaattgaaaaactcgcccttttctttaaaggtgtcgtgcgaccgaacgctaaaacggataccggcgccggagaaatatctaaatcattttcgatatttcaatccgccgaaagaattatcgaggagctgaagtttatcaaaaatgtgacgcggatggataatgaaattttcccatcagaaggagtgtttttagatgcggcaaatgtcttgggagttagaggcgacgacttcgatttttcaaacgaatttgtcggtgatgatttgcattctgacgccaataaaaaaattatcaataagatcaacggcaccaaagaagatcgcaatttgcgcaacttcataataaataatgttgtcaagtcgcggcgctttcaatatatcgcccgccacatgaacacacactatgttaaacaactcgccaacaacgaaactctcaaccgctttgtcttaaataaaatgggtgatgctaaaatcattaaccgctactacgaaagcatcagtggaaacactccaaatatcgaggttagaagccagatcgattatttggttaaacgtcttcggagtttcagttttgaagatctcaacgacgtaaaacaaaaagtgaggcccggcacaaatgaaagcatagaaaaggaaaagaaaaaagcgctagtgggtctttgcttaaccattcaatacttggtatataagaatctcgtcaatataaacgctcgttatacgactgctttctattgtcttgaacgggacagcaaacttaaaggctttggagttgatgtttggcgagattttgaaagctatacagccctgacaaatcactttattaaagagggctatcttcctgtccgcaaggcagaaattttacgagcgaatttaaaacatcttgattgcgaagatggatttaaatattatcgcaaccaagtcacacaccttaacgccatccgcgtagcatacaaatatattaacgaaattaaaagtgttcactcatatttcgcgctctatcattatattatgcaacgccacctatatgattctttgcaggcaaaggcaaaagattctagtggttttgttattgacgccttaaaaaagagttttgagcacaagatttactcgaaggatcttttgcacgttcttcattcgcccttcggttacaatacggcccgatacaaaaacttaagtatcgaggcattatttgacaaaaacgaaagccggcccgaggtgaatcctttatcgaccaacgat

SEQ ID NO: 141 - DNA, 2769 bp, Artificial Sequence
  Ruminococcus sp. CAG:57 nCas1 sequence
atggcaaaaaagaataaaatgaagcctagagagctgcgtgaggctcagaaaaaagccagacagctcaaagcggctgagataaataataacgctgctcctgcgatcgctgccatgcctgctgcagaggtcattgcacctgtggcagagaagaaaaaatcctccgtaaaggcggcaggaatgaagtctattcttgtcagcgaaaataaaatgtacataacctctttcggcaagggcaattctgctgtgcttgaatatgaggtggacaataatgactacaacaaaactcagctttcttcaaaggacaacagcaatatcgagcttggtgatgtaaacgaggtaaacatcactttttcaagcaagcatggctttgggagcggagtggagataaatacttcaaaccctactcacagaagcggtgaaagctcgcctgtaagaggggatatgctggggcttaaatcggagcttgaaaagcgctttttcggcaaaacttttgatgataatatacatatccagcttatttacaacattctggatatcgaaaagatacttgcggtgtatgtaacgaatatcgtttatgcgctgaacaatatgcttggtataaaggattctgaaagttatgatgattttatggggtatctttctgcaagaaatacttatgaagtttttactcaccctgacaaaagcaatctttccgataaggtaaagggtaatatcaagaaaagccttagcaagtttaatgacttgctgaaaactaagcgccttggctatttcggccttgaagagccaaagacaaaagacacaagagcttcggaagcatacaaaaagcgtgtttatcatatgcttgcaattgtggggcagataagacagtgtgtttttcatgataaatcgggtgcaaaaagatttgacctttacagttttattaacaatattgatcccgaatacagagatactcttgactatcttgttgaggagcgtttaaagtccataaacaaggactttatcgagggtaacaaggtcaatatcagcctgcttattgatatgatgaaaggctatgaggctgatgatatcatacgcctttattacgatttcattgtgcttaaatctcagaaaaatctcggcttttctatcaaaaagcttcgtgagaaaatgctggaggaatacggtttcagatttaaggacaagcaatatgactctgtgcgctcaaagatgtacaagcttatggatttcctgcttttctgcaactactacagaaatgacgttgccgcaggcgaagctcttgtgcgtaaactgcgtttttcaatgaccgatgatgaaaaagaggggatatatgctgatgaagcggcaaagctttggggcaaattcaggaatgattttgaaaatatcgccgaccacatgaacggtgacgttatcaaggagcttggcaaggctgacatggattttgatgagaaaattcttgacagtgaaaagaagaatgcgtctgaccttttgtatttctccaaaatgatatatatgctcacatattttcttgacggcaaggagataaacgatcttcttacaacgcttatcagcaagtttgataacatcaaggagtttttgaagataatgaaaagctctgctgttgatgttgagtgtgagcttacggcgggctacaagctgttcaatgacagccagaggataaccaacgagctttttatcgtaaagaacattgcttccatgagaaagcctgcggcttcagcgaagcttacgatgttccgtgacgcactgactatactcggtatagacgacaatatcacggacgataggataagcgagattctaaaacttaaagaaaaaggcaagggcatacatggtctgagaaattttataacaaacaatgttatcgagtcctctcggtttgtataccttatcaagtatgcgaacgctcagaagataagagaagtggctaaggatgagaaagttgtcatgtttgttcttgggggtatccctgacacgcagatagagcgttattacaagagttgtgtggagtttcctgacatgaatagttctttggaagcaaagcgcagtgagcttgcgagaatgataaagaacatcagctttgatgatttcaaaaatgtgaaacagcaggcaaagggcagagaaaacgtggctaaggagagggcaaaggctgttatcgggctttatcttacggtcatgtatctgctggtgaaaaatcttgtgaatgtcaatgcaaggtatgttattgcgatacactgccttgaacgtgattttgggctgtataaggagataattcctgagttggcttcaaagaacttgaaaaatgactacaggatactttcacagacgctttgtgaactttgtgatgatcgtaatgagtcgtcgaatttgttcttgaaaaagaacaagcggctgcgcaagtgcgttgaagttgatatcaataatgcagacagcagcatgacaagaaaataccgcaactgtattgctcatcttactgtagttcgtgaactgaaagaatacataggagatattcgtacagtggattcttacttctccatttatcattatgttatgcagcgttgtatcacgaaaaggggagatgacacaaagcaagaagagaaaataaagtatgaggacgatcttttaaaaaatcacggctatacgaaagactttgtaaaggctctcaactcgccgtttggatacaacattccgaggtttaaaaatctttcaattgagcagttgtttgacagaaatgaatatcttactgaaaagtag

SEQ ID NO: 142 - DNA, 2715 bp, Artificial Sequence
  Human codon-optimized Gut metagenome P1E0 nCas1
gaaagggaggtgaagaagcctcccaagaaatccctggccaaagccgccggactgaagtccacattcgtcatcagcccccaggaaaaggaactcgctatgaccgcctttggcagaggcaacgatgccctgctgcaaaagagaatcgtggacggcgtggtccgtgatgttgccggagagaaacagcagttccaggtccagaggcaagacgagagcagattcagactccaaaactccagactggccgataggaccgtcaccgctgacgaccccctccacagggctgaaacacccaggagacagcctctgggcgctggcatggatcagctgaggagaaaagccattctggagcaaaagtactttggcaggacattcgacgacaacatccacatccagctgatctacaacatcctggacatccacaagatgctggctgtgcctgctaaccatatcgtgcacaccctgaacctcctgggaggctacggcgaaactgattttgtgggaatgctgcctgccggactcccctacgataagctcagggtcgtgaagaaaaaaaatggcgataccgtcgacatcaaggccgacattgctgcctatgccaaaagaccccagctggcttacctgggagctgccttctatgacgtgacccctggaaaaagcaagcgtgatgctgccaggggcagggtgaagagggaacaggacgtctatgccattctgtccctcatgtccctgctgagacaattctgcgcccacgatagcgtcaggatctggggccagaataccaccgccgccctgtaccacctccaggccctgccccaggatatgaaggacctgctggacgacggctggaggagagctctgggaggcgtgaatgaccatttcctcgacaccaacaaggtgaacctcctcaccctcttcgagtactatggcgccgaaaccaagcaggctagggtggccctgacacaggacttttacaggttcgtggtgctgaaggagcagaagaacatgggctttagcctcaggaggctgagggaagagctgctgaagctgcccgacgccgcttacctgaccggacaggagtacgactccgtgaggcagaaactgtacatgctcctggacttcctgctgtgcaggctgtacgcccaggagagagccgatagatgcgaagagctggtgagcgccctcagatgtgctctgagcgacgaggagaaggatacagtctaccaagctgaagccgctgccctgtggcaagccctgggcgacacactcaggaggaaactcctccccctcctgaagggcaagaaactgcaagacaaggataagaaaaagtccgacgaactcggcctgtccagggatgtgctcgatggcgtgctctttagacctgcccagcagggcagcagagccaacgccgactacttttgtaggctcatgcacctgagcacctggtttatggacggcaaggagatcaataccctgctgaccaccctgatctccaagctggagaatatcgatagcctgaggtccgtcctggagtccatgggcctggcctatagctttgtccctgcctacgccatgtttgaccacagcagatacatcgctggccagctgagggtggtgaacaacatcgccagaatgaggaaacccgccattggagccaaaagagagatgtacagggccgctgtcgtgctgctcggagtggacagccccgaagctgctgccgccattacagacgatctgctgcagatcgatcccgaaactggaaaggttcgtcctagatccgactccgctagagacaccggactgaggaacttcatcgctaacaacgtcgtggagagcaggaggttcacctacctcctgagatacatgacccctgaacaggccagggtcctggctcaaaacgagaagctgattgccttcgtgctcagcacagtgcccgacacccagctggagaggtattgtaggacctgtggaagggaggacatcacaggcaggcccgcccagattaggtatctgaccgctcagatcatgggcgtgaggtacgaaagctttaccgacgtggaacagaggggaaggggcgataatcctaaaaaggagagatacaaggccctgatcggcctctacctgacagtgctgtatctggccgtcaaaaatatggtgaattgtaacgccaggtacgtgatcgccttctactgcagggatagggacaccgccctctaccagaaggaagtgtgttggtatgacctggaggaggacaagaagtccggaaagcaaagacaggtcgaggactatacagccctgaccagatatttcgtgtcccagggctacctgaacagacacgcctgcggctatctcaggtccaacatgaacggcatcagcaacagcctgctgaccgcctacagaaatgccgtggaccacctgaacgccattcctcctctgggctccctgtgtagggacatcggcagagtggattcctacttcgctctgtaccactacgccgtgcaacagtacctcaatggaaggtattacagaaaaacacccagagaacaggaactcttcgccgccatggctcagcacaggacctggtgttccgatctcgtgaaggccctgaacacccctttcggatacaacctggccaggtacaagaacctctccatcgacggactgttcgacagggagggcgatcatgtggtgagagaggatggcgaaaaacctgccgaa

SEQ ID NO: 143 - DNA, 2835 bp, Artificial Sequence
  Human codon-optimized Anaerobic Digester  nCas1
aacaacaagagaaaaacaaaggctaaagccgccggcctgaagagcgtttttttcgatcagaagcaggccgtcctgaccacattcgctaaaggcaacaacagccagatcgagaagaaggtggtcaatagcgaagtgaaggacctgagacagccccctgcctttgacctcgaactgaaagaaaaaactttttacatcagcggaaagaataatatcaacaccagcagagagaaccctctggccagcgccagcctgcctctgtccaaaaggcagaggattagggctgagaggatcaagagggccagagaggagaacaggccctaccacaacgtcaaaagggtcggcgaggatgatctgagggccaaagccgacctggagaagcattattttggaaaggaatacagcgataatctcaagatccagatcatttataacattctggacatcaataagatcatcagcccctacatcaatgacatcgtgtactccatgaacaatctggccaggaatgatgagtatatcgacggcaagatcgatgtgatcggttctctgtcctccaccacagactatagcagcttcatgagccccaataaggatctggaaaaggagaagaaattcagctttcacagagaaaactataaaaaatttgtcgaggcctccaagccctacatgagatattacggcaaagtctttatcagggacgtgaaaaaatccaagctgtccaccggcaagggcgaaaagatcgaggtgatgtacaggagcgatgaagagattttcaccatcttccaaatcctgtcctacgtgaggcagagcatcatgcataatgacattggcaacaagagcagcatcctcgccatcgaaaaataccccgccagattcgtgggcttcctgtccgacctcttaaaaactaagaccaacgacgtgaacaggatgttcatcgataacaatagccagacaaatttctgggtcctgttctccatcttcggcctccaggaccatacaagcggcgctgataagatctgcaggaacttctatgatttcgtgatcaaggccgacagcaagaacctgggattctccctgaaaaagatcagggagctcatgctggacctccctaacgctaacatgctcagggatcaccagttcgacacagtgaggagcaagttctataccctcctcgactttatcatttaccagcattacctggaagagaagagcaggatcgacaacatggtcgagaagctcaggatgaccctgaaagaagaggagaaggaggtgctctacgctgccgaagccaagatcgtgtggaatgccattggcgccaaggtcatcaacaagctggtgcctatgatgaacggtgatgctctgaaggagattaaaagaaagaacagggataggaagctgccccagtccgtgatcgctaccgtccaggtgaatagcgatgccaatgtgttttccggcctcatctacttcctcaccctcttcctggacggcaaagagattaacgagatggtgagcaatctcatcaccaagttcgagaatatcgactccctgctgcatgtggatagggagatctataagtccgacgagaaggacctcgacctcgaaatcgagaaactggctctgtttttcaaaggcgtggtcaggcccaacgccaaaacagacacaggagctggcgaaatcagcaagagcttcagcattttccagagcgccgagaggatcatcgaggagctgaaatttatcaagaatgtgacaaggatggacaacgagatctttcccagcgagggagtgttcctggatgctgccaatgtgctgggcgtgagaggagatgacttcgacttttccaacgagttcgtcggcgatgacctccactccgatgccaataaaaagatcatcaacaaaatcaatggcaccaaggaggacaggaacctcagaaacttcattattaataatgtggtgaagagcaggaggttccaatacatcgccaggcacatgaatacccactatgtgaagcagctggccaacaacgagacactgaacaggttcgtgctcaacaaaatgggcgacgccaagattatcaacaggtactatgagtccatcagcggcaacacccccaatatcgaggtcagatcccagattgactacctcgtcaaaagactcaggagcttctccttcgaggacctcaatgacgtgaagcaaaaagtcagacccggcaccaacgaatccatcgagaaggaaaagaaaaaggctctcgtcggactctgcctgacaatccaatatctggtgtacaaaaacctggtcaacatcaacgctaggtacaccacagccttctactgcctggaaagggattccaagctgaagggctttggcgtggatgtgtggagggatttcgagagctacaccgctctgaccaaccacttcatcaaggaaggctatctccccgtcaggaaggccgagattctgagagccaatctgaagcatctggactgcgaggacggcttcaagtattacagaaaccaggtcacccatctgaacgccatcagagtggcttataagtatattaacgaaattaagtccgtgcacagctactttgccctgtaccactacatcatgcagaggcacctctatgactccctccaagccaaagccaaggatagctccggcttcgtcattgacgccctgaagaagtccttcgaacataaaatctacagcaaagacctcctgcacgtgctccattcccctttcggctacaacaccgccaggtacaagaacctgagcatcgaggctctgttcgacaagaatgagagcaggcctgaagtcaaccccctctccaccaacgac

SEQ ID NO: 144 - DNA, 2898 bp, Artificial Sequence
  Human codon-optimized Ruminococcus flavefaciens XPD nCas1
atcgaaaaaaaaaagtccttcgccaagggcatgggcgtgaagtccacactcgtgtccggctccaaagtgtacatgacaaccttcgccgaaggcagcgacgccaggctggaaaagatcgtggagggcgacagcatcaggagcgtgaatgagggcgaggccttcagcgctgaaatggccgataaaaacgccggctataagatcggcaacgccaaattcagccatcctaagggctacgccgtggtggctaacaaccctctgtatacaggacccgtccagcaggatatgctcggcctgaaggaaactctggaaaagaggtacttcggcgagagcgctgatggcaatgacaatatttgtatccaggtgatccataacatcctggacattgaaaaaatcctcgccgaatacattaccaacgccgcctacgccgtcaacaatatctccggcctggataaggacattattggattcggcaagttctccacagtgtatacctacgacgaattcaaagaccccgagcaccatagggccgctttcaacaataacgataagctcatcaacgccatcaaggcccagtatgacgagttcgacaacttcctcgataaccccagactcggctatttcggccaggcctttttcagcaaggagggcagaaattacatcatcaattacggcaacgaatgctatgacattctggccctcctgagcggactgaggcactgggtggtccataacaacgaagaagagtccaggatctccaggacctggctctacaacctcgataagaacctcgacaacgaatacatctccaccctcaactacctctacgacaggatcaccaatgagctgaccaactccttctccaagaactccgccgccaacgtgaactatattgccgaaactctgggaatcaaccctgccgaattcgccgaacaatatttcagattcagcattatgaaagagcagaaaaacctcggattcaatatcaccaagctcagggaagtgatgctggacaggaaggatatgtccgagatcaggaaaaatcataaggtgttcgactccatcaggaccaaggtctacaccatgatggactttgtgatttataggtattacatcgaagaggatgccaaggtggctgccgccaataagtccctccccgataatgagaagtccctgagcgagaaggatatctttgtgattaacctgaggggctccttcaacgacgaccagaaggatgccctctactacgatgaagctaatagaatttggagaaagctcgaaaatatcatgcacaacatcaaggaatttaggggaaacaagacaagagagtataagaagaaggacgcccctagactgcccagaatcctgcccgctggccgtgatgtttccgccttcagcaaactcatgtatgccctgaccatgttcctggatggcaaggagatcaacgacctcctgaccaccctgattaataaattcgataacatccagagcttcctgaaggtgatgcctctcatcggagtcaacgctaagttcgtggaggaatacgcctttttcaaagactccgccaagatcgccgatgagctgaggctgatcaagtccttcgctagaatgggagaacctattgccgatgccaggagggccatgtatatcgacgccatccgtattttaggaaccaacctgtcctatgatgagctcaaggccctcgccgacaccttttccctggacgagaacggaaacaagctcaagaaaggcaagcacggcatgagaaatttcattattaataacgtgatcagcaataaaaggttccactacctgatcagatacggtgatcctgcccacctccatgagatcgccaaaaacgaggccgtggtgaagttcgtgctcggcaggatcgctgacatccagaaaaaacagggccagaacggcaagaaccagatcgacaggtactacgaaacttgtatcggaaaggataagggcaagagcgtgagcgaaaaggtggacgctctcacaaagatcatcaccggaatgaactacgaccaattcgacaagaaaaggagcgtcattgaggacaccggcagggaaaacgccgagagggagaagtttaaaaagatcatcagcctgtacctcaccgtgatctaccacatcctcaagaatattgtcaatatcaacgccaggtacgtcatcggattccattgcgtcgagcgtgatgctcaactgtacaaggagaaaggctacgacatcaatctcaagaaactggaagagaagggattcagctccgtcaccaagctctgcgctggcattgatgaaactgcccccgataagagaaaggacgtggaaaaggagatggctgaaagagccaaggagagcattgacagcctcgagagcgccaaccccaagctgtatgccaattacatcaaatacagcgacgagaagaaagccgaggagttcaccaggcagattaacagggagaaggccaaaaccgccctgaacgcctacctgaggaacaccaagtggaatgtgatcatcagggaggacctcctgagaattgacaacaagacatgtaccctgttcagaaacaaggccgtccacctggaagtggccaggtatgtccacgcctatatcaacgacattgccgaggtcaattcctacttccaactgtaccattacatcatgcagagaattatcatgaatgagaggtacgagaaaagcagcggaaaggtgtccgagtacttcgacgctgtgaatgacgagaagaagtacaacgataggctcctgaaactgctgtgtgtgcctttcggctactgtatccccaggtttaagaacctgagcatcgaggccctgttcgataggaacgaggccgccaagttcgacaaggagaaaaagaaggtgtccggcaattcc

SEQ ID NO: 145 - DNA, 2829 bp, Artificial Sequence
  Human codon-optimized Ruminococcus albus nCas1
gccaagaagtccaagggaatgtccctcagggagaagagggagctggagaagcaaaagaggattcagaaggccgccgtgaatagcgtgaacgatacccctgaaaaaactgaggaggctaatgtggtcagcgtgaacgtgagaaccagcgccgagaacaagcactccaaaaagagcgctgccaaagccctgggcctgaaaagcggcctcgtgattggagatgagctctacctgaccagcttcggaaggggcaacgaagccaagctggagaagaagattagcggcgacaccgtggagaaactgggaattggcgcctttgaggtcgccgaacgtgatgaaagcacactcacactcgagagcggcaggatcaaagacaaaaccgccaggcctaaggaccccagacatattaccgtggacacccagggaaagtttaaggaggacatgctgggcatcaggtccgtgctcgaaaagaagatctttggaaaaaccttcgacgataacatccacgtccagctggcctacaacatcctggacgtcgagaagatcatggctcagtatgtgagcgacatcgtctacatgctgcacaacaccgacaagaccgagaggaacgataacctgatgggatacatgtccattagaaatacctacaaaaccttctgcgacacatccaatctgcccgacgacacaaagcagaaggtggagaatcagaaaagggaattcgacaagatcattaagagcggcagactgggctacttcggcgaagctttcatggtcaacagcggcaactccaccaagctgaggcccgagaaagagatttatcatatcttcgccctcatggccagcctgaggcagagctacttccacggatacgtcaaggataccgactatcagggcacaacatgggcctacacactggaggataagctgaagggccccagccatgaatttagggagacaatcgacaagatctttgacgagggattcagcaagatctccaaggacttcggaaaaatgaacaaagtgaatctccaaatcctggagcagatgatcggcgagctgtacggaagcatcgaaaggcagaacctgacctgcgattactacgattttattcaactcaagaagcacaagtatctcggctttagcatcaagaggctgagagagacaatgctcgagacaacccctgccgagtgttataaggctgagtgctacaatagcgagaggcaaaagctctacaagctgatcgacttcctcatctacgacctctactataacaggaagcccgccagaatcgaagagatcgtcgacaagctgagagagagcgtcaacgacgaggagaaggagagcatctatagcgtggaggccaagtacgtgtatgagtccctgagcaaggtgctggataagagcctgaagaattccgtgtccggcgaaactatcaaggatctgcagaagaggtacgacgacgaaactgccaacagaatttgggacatctcccagcactccatttccggcaatgtcaactgcttctgcaagctgatctacattatgaccctcatgctggatggaaaggagatcaacgacctcctcaccaccctggtgaacaagtttgacaatattgcttcctttattgacgtgatggacgaactcggcctggaacacagctttacagacaactacaagatgtttgccgacagcaaggccatctgcctggacctgcaattcatcaatagctttgctagaatgagcaagatcgacgacgagaaaagcaagagacagctgttcagggatgctctggtgatcctcgatatcggaaacaaggacgaaacttggattaacaactacctcgactccgacatcttcaagctggacaaggaaggcaacaagctgaagggagccaggcatgactttaggaattttatcgccaataatgtcattaagtcctccagattcaagtacctcgtcaaatacagctccgccgacggcatgattaagttaaaaactaacgaaaagctgattggcttcgtgctcgacaagctccccgaaactcaaatcgataggtactacgaatcctgcggcctcgacaatgccgtcgtggacaagaaggtgaggatcgagaaactgtccggactcatcagggacatgaagttcgacgatttttccggcgtcaagacctccaataaggccggcgacaacgataagcaggacaaggccaagtaccaggccattatctccctgtacctgatggtgctctaccagattgtgaagaatatgatctacgtcaacagcaggtatgtgattgccttccactgcctggagagggacttcggaatgtacggcaaggatttcggcaagtactaccagggctgtaggaagctcaccgatcatttcatcgaggagaaatacatgaaggagggcaagctgggctgtaacaagaaagtcggcaggtacctgaagaataacatcagctgttgcaccgacggcctgattaacacctacaggaaccaggtcgatcatttcgccgtcgtcagaaaaatcggaaattacgccgcctacatcaaatccattggcagctggttcgagctctatcattacgtgattcagaggatcgtttttgacgaatatagattcgccctcaacaacaccgagtccaactataagaacagcatcattaagcaccatacatactgcaaggacatggtgaaggccctgaatacccctttcggctacgacctgcccagatataaaaacctgagcattggtgatttattcgacaggaacaactatctgaacaaaacaaaggagtccatcgatgccaactccagcattgatagccag

SEQ ID NO: 146 - DNA, 330 bp, Artificial Sequence
  Artificial sequence
ctactacactggtgcgaatttgcactagtctaaaacaagctttttcttcattgtctacaaatgcaactactacactagtgcgaatttgcactagtctaaaactctatgtagcttttcttgtaaaacatatttctactacactggtgcgattttgcactagtctaaaactcatctgccttctgcatatcggacacttgactactacaccggtgcgaatttgcactagtctaaaacttacacctccttatgcgattttatcgtgcgctactacactggtgcgaatttgcactagtctaaaacttcatcttcaagaccgagcagggacatcat

SEQ ID NO: 147 - protein, 939 aa, Artificial Sequence
  Metagenomic hit (no protein accession):  contig emb|OBVH01003037.1, human gut metagenome sequence (also found in WGS contigs emb|OBXZ01000094.1| and emb|OBJF01000033.1|)
MAKKKRITAKERKQNHRELLMKKADSNAEKEKAKKPVVENKPDTAISKDNTPKPNKEIKKSKAKLAGVKWVIKANDDVAYISSFGKGNNSVLEKRIMGDVSSNVNKDSHMYVNPKYTKKNYEIKNGFSSGSSLVTYPNKPDKNSGMDALCLKPYFEKDFFGHIFTDNMHIQAIYNIFDIEKILAKHITNIIYTVNSFDRNYNQSGNDTIGFGLNYRVPYSEYGGGKDSNGEPKNQSKWEKRDNFIKFYNESKPHLGYYENIFYDHGEPISEEKFYNYLNILNFIRNNTFHYKDDDIELYSENYSEEFVFINCLNKFVKNKFKNVNKNFISNEKNNLYIILNAYGKDTENVEVVKKYSKELYKLSVLKTNKNLGVNVKKLRESAIEYGYCPLPYDKEKEVAKLSSVKHKLYKTYDFVITHYLNSNDKLLLEIVETLRLSKNDDEKENVYKKYAEKLFKADDVINPIKAISKLFARKGNKLFKEKIIIKKEYIEDVSIDKNIYDFTKVIFFMTCFLDGKEINDLLTNIISKLQVIEDHNNVIKFISNNKDAVYKDYSDKYAIFRNAGKIATELEAIKSIARMENKIENAPQEPLLKDALLSLGVSDDTKVLENTYNKYFDSKEKTDKQSQKVSTFLMNNVINNNRFKYVIKYINPADINGLAKNRYLVKFVLSKIPEEQIDSYYKLFSNEEEPGCEEKIKLLTKKISKLNFQTLFENNKIPNVEKEKKKAIITLYFTIVYILVKNLVNINGLYTLALYFVERDGYFYKDICGKKDKKKSYNDVDYLLLPEIFSGSKYREETKNLKLPKEKDRDIMKKYLPNDKDREKYNKFFTAYRNNIVHLNIIAKLSELTKNIDKDINSYFDIYHYCTQRVMFNYCKEKNDVVLAKMKDLAHIKSDCNEFSSKHTYPFSSAVLRFMNLPFAYNVPRFKNLSYKKFFDKQ

SEQ ID NO: 148 - DNA, 36 bp, Artificial Sequence
  DR sequence
gattgaaaggattgtaaatttgcaaggtcttaaaac

SEQ ID NO: 149 - protein, 958 aa, Artificial Sequence
  Metagenomic hit (no protein accession):  contig tpg|DBYI01000091.1| (Uncultivated Ruminococcus flavefaciens UBA1190 assembled from bovine gut metagenome)
MKKKIKARDLREAKKQEKLAAFSAKANTVYENEDKNVEAFPEALNLRSIKKSMNKAAGLKSTLIDGKSLYLTAFGKGNNAVVEHMIATDDSYSLKTLENEPSLKVKAADELKVTFMSRRPFVQESELSAVNPLHSGKDKPNKSAGQDMLGLKSELEKRYFGKIFDDNLHIQIIHNILDIEKIIAVYATNITAAIDHMVDDDNEQYLQGDFIGYMNTLNTYEVFMEPSKNPRLDSNARKNIENSREKFEYLLDTQRLGYLSLEYDKRSKDKRKSEEIKKRLYHLVAFAGQLRQWSFHSVEGLPRTWIYQLDNPKLAQEYRDTLDYFFNERFDAINKDFIETNNINLHILKEVFPAEDFQKLAALYYDFIVKKTFKNIGFSIKNLREQMLECDEAEKIRSKDMNSVRSKLYKLFDFCIFYQYFIDEERSRENVNYLRSTLNDEQKDAFYEEEGKRLWSENRKKFIYFCDNINKWVKNDYSDEVAKCIDLNEFRVNSNVSYFSKLLYAMSFFLDGKEINDLLTTLINKFDNIRSFIDTANFLNIDVKFTKDYDFFNIICDYAGELNIIKNIARMKKPSPSAKKNMYRDALTILGIPTEMSDEQLDAEIDKILEKKINPVTGKTEKGKNPFRNFIANNVIENKRFIYVIKFCNPKNVRKLVNNTKVTEFVLKRMPETQIDRYFESCIEGNLNPTTEKKIEKLAEMIKNIKFEEFRNVKQKVRDNSQEAVEKERFKAIIGLYLTVIYLLVKNLVNVNSRYVMAFHCLERDAKLYGVQNIGGDYLALTAKLCAEGDDYGKKLSEAKQNINQDKVQMPKNYFLARNKRWREAIEQDIDNAKKWFIGEKFNNVKNYRNNVAHLTAIRNCAEFIGEITKIDSYFALYHYLIQRQLAGRLDPNHPGFEKNYPQYAPLFKWNTYVKDMVKALNSPFGYNIPRFKDLSIDALFDRNEMKEETDDEKKIQT

SEQ ID NO: 150 - DNA, 36 bp, Artificial Sequence
  DR 1
gaactatacccctaccaaatggtcggggtctgaaac

SEQ ID NO: 151 - DNA, 37 bp, Artificial Sequence
  DR2
tgaactacacccctgccaagtggttggggtctgaaac

SEQ ID NO: 152 - DNA, 36 bp, Artificial Sequence
  DR3
gaactacacccctaccaagtggttggggtctgaaac

SEQ ID NO: 153 - protein, 877 aa, Artificial Sequence
  Metagenomic hit (no protein accession):  contig tpg|DJXD01000002.1| (uncultivated Ruminococcus assembly, UBA7013, from sheep gut metagenome)
MKKQKSKKTVSKTSGLKEALSVQGTVIMTSFGKGNMANLSYKIPSSQKPQNLNSSAGLKNVEVSGKKIKFQGRHPKIATTDNPLFKPQPGMDLLCLKDKLEMHYFGKTFDDNIHIQLIYQILDIEKILAVHVNNIVFTLDNVLHPQKEELTEDFIGAGGWRINLDYQTLRGQTNKYDRFKNYIKRKELLYFGEAFYHENERRYEEDIFAILTLLSALRQFCFHSDLSSDESDHVNSFWLYQLEDQLSDEFKETLSILWEEVTERIDSEFLKTNTVNLHILCHVFPKESKETIVRAYYEFLIKKSFKNMGFSIKKLREIMLEQSDLKSFKEDKYNSVRAKLYKLFDFIITYYYDHHAFEKEALVSSLRSSLTEENKEEIYIKTARTLASALGADFKKAAADVNAKNIRDYQKKANDYRISFEDIKIGNTGIGYFSELIYMLTLLLDGKEINDLLTTLINKFDNIISFIDILKKLNLEFKFKPEYADFFNMTNCRYTLEELRVINSIARMQKPSADARKIMYRDALRILGMDNRPDEEIDRELERTMPVGADGKFIKGKQGFRNFIASNVIESSRFHYLVRYNNPHKTRTLVKNPNVVKFVLEGIPETQIKRYFDVCKGQEIPPTSDKSAQIDVLARIISSVDYKIFEDVPQSAKINKDDPSRNFSDALKKQRYQAIVSLYLTVMYLITKNLVYVNSRYVIAFHCLERDAFLHGVTLPKMNKKIVYSQLTTHLLTDKNYTTYGHLKNQKGHRKWYVLVKNNLQNSDITAVSSFRNIVAHISVVRNSNEYISGIGELHSYFELYHYLVQSMIAKNNWYDTSHQPKTAEYLNNLKKHHTYCKDFVKAYCIPFGYVVPRYKNLTINELFDRNNPNPEPKEEV

SEQ ID NO: 154 - DNA, 36 bp, Artificial Sequence
  DR
caactacaaccccgtaaaaatacggggttctgaaac

SEQ ID NO: 155 - protein, 984 aa, Artificial Sequence
  Metagenomic hit (no protein accession): contig OGZC01000639.1 (human gut metagenome assembly)
MKKKNIRATREALKAQKIKKSQENEALKKQKLAEEAAQKRREELEKKNLAQWEETSAEGRRSRVKAVGVKSVFVVGDDLYLATFGNGNETVLEKKITPDGKITTFPEEETFTAKLKFAQTEPTVATSIGISNGRIVLPEISVDNPLHTTMQKNTIKRSAGEDILQLKDVLENRYFDRSFNDDLHIRLIYNILDIEKILAEYTTNAVFAIDNVSGCSDDFLSNFSTRNQWDEFQNPEQHREHFGNKDNVICSVKKQQDLFFNFFKNNRIGYFGKAFFHAESERKIVKKTEKEVYHILTLIGSLRQWITHSTEGGISRLWLYQLEDALSREYQETMNNCYNSTIYGLQKDFEKTNAPNLNFLAEILGKNASELAEPYFRFIITKEYKNLGFSIKTLREMLLDQPDLQEIRENHNVYDSIRSKLYKMIDFVLVYAYSNERKSKADALASNLRSAITEDAKKRIYQNEADQLWTSYQELFKRIRGFKGAQVKEYSSKNMPIPIQKQIQNILKPAEQVTYFTKLMYLLTMFLDGKEINDLLTTLINKFDNISSLLKTMEQLELQTTFKEDYTFFQQSSRLCKEITQLKSFARMGNPISNLKEVMMVDAIQILGTEKSEQELQSMACFFFRDKNGKKLNTGEHGMRNFIGNNVISNTRFQYLIRYGNPQKLHTLSQNETVVRFVLSRIAKNQRVQGMNGKNQIDRYYETCGGTNSWSVSEEEKINFLCKILTNMSYDQFQDVKQSGAEITAEEKRKKERYKAIISLYLTVLYQLIKNLVNINARYIIAFHCLERDAILYSSKFNTSINLKKRYTALTEMILGYETDEKARRKDTRTVYEKAEAAKNRHLKNVKWNCKTRENLENADKNAIVAFRNIVAHLWIIRDADRFITGMGAMKRYFDCYHYLLQRELGYILEKSNQGSEYTKKSLEKVQQYHSYCKDFLHMLCLPFAYCIPRYKNLSIAELFDRHEPEAEPKEEASSVNNSQFITT

SEQ ID NO: 156 - DNA, 33 bp, Artificial Sequence
  DR 1
actacaatccatggttatcgtggatactaaaac

SEQ ID NO: 157 - DNA, 33 bp, Artificial Sequence
  DR2
actacaatccacgtttatcgtggatactaaaac

SEQ ID NO: 158 - protein, 978 aa, Artificial Sequence
  Metagenomic hit (no protein accession): contig emb|OHBM01000764.1 (human gut metagenome assembly)
  misc_feature (1)..(222): Xaa can be any naturally occurring amino acid
XXXXXXXXXXXXXXXXXXXXXXXXXXXXXXXXXXXXXXXXXXXXXXXXXXXXXXXXXXXXXXXXXXXXXXXXXXXXXXXXXXXXXXXXXXXXXXXXXXXXXXXXXXXXXXXXXXXXXXXXXXXXXXXXXXXXXXXXXXXXXXXXXXXXXXXXXXXXXXXXXXXXXXXXXXXXXXXXXXXXXXXXXXXXXXXXXXXXXXXXXXXXXXXXXXXXXXXXXXXXXXHPLQKRYRYLTSTNLKSFETYKNNLVNKKKFDLDRVKKIPQLAYFGSAFYNTPEDTSAKITKTKIKSNEEIYYTFMLLSTARNFSAHYLDRNRAKSSDAEDFDGTSVIMYNLDNEELYKKLYNKKVHMALTGMKKVLDANFNKKVEHLNNSFIKNSAKDFVILCEVLGIKSRDEKTKFVKDYYDFVVRKNYKHLGFSVKELRELLFANHDSNKYIKEFDKISNKKFDSVRSRLNRLADYIIYDYYNKNNAKVSDLVKYLRAAADDEQKKKIYLNESINLVKSGILERIKKILPKLNGKIIGNMQPDSTITASMLHNTGKDWHPISENAHYFTKWIYTLTLFMDGKEINDLVTTLINKFDNIASFIEVLKSQSVCTHFSEERKMFIDSAEICSELSAMNSFARMEAPGASSKRAMFVEAARILGDNRSKEELEEYFDTLFDKSASKKEKGFRNFIRNNVVDSNRFKYLTRYTDTSSVKAFSNNKALVKFAIKDIPQEQILRYYNSCFGASERYYNDGMSDKLVEAIGKINLMQFNGVIQQADRNMLPEEKKKANAQKEKYKSIIRLYLTVCYLFFKNLVYVNSRYYSAFYNLEKDRSLFEINGELKPTGKFDEGHYTGLVKLFIDNGWINPRASAYLTVNLANSDETAIRTFRNTAEHLEALRNADKYLNDLKQFDSYFEIYHYITQRNIKEKCEMLKEQTVKYNNDLLKYHGYSKDFVKALCVPFGYNLPRFKNLSIDALFDKNDKREKLKKGFED

SEQ ID NO: 159 - DNA, 36 bp, Artificial Sequence
  DR
gaactacagccctccttaaatggggggttctaaaac

SEQ ID NO: 160 - protein, 1023 aa, Artificial Sequence
  Metagenomic hit (no protein accession): contig emb|OHCP01000044.1 (human gut metagenome assembly)
MAKKITAKQKREEKERLNKQKWAKNDSVIIVPETKEEIKTGEIQDNNRKRSRQKSQAKAMGLKAVLSFDNKIAIASFVSSKNAKSSHIERITDKEGTTISVNSKMFESSVNKRDINIEKRITIEEPQQDGTIKKEEKGVKSTTCNPYFKVGGKDYIGIKEIAEEHFFGRAFPNENLRVQIAYNIFDVQKILGTFVNNIIYSFYNLSRDEVQSDNDVIGMLYSISDYDRQKETETFLQAKSLLKQTEAYYAYFDDVFKKNKKPDKNKEGDNSKQYQENLRHNFNILRVLSFLRQICMHAEVHVSDDEGCTRTQNYTDSLEALFNISKAFGKKMPELKTLIDNIYSKGINAINDEFVKNGKNNLYILSKVYPNEKREVLLREYYNFVVCKEGSNIGISTRKLKETMIAQNMPSLKEENTYRNKLYTVMNFILVRELKNCATIREQMIKELRANMDEEEGRDRIYSKYAKEIYLYVKDKLKLMLNVFKEEAEGIIIPGKEDPVKFSHGKLDKKEIESFCLTTKNTEDITKVIYFLCKFLDGKEINELCCAMMNKLDGISDLIETAKQCGEDVEFVDQFKCLSKCATMSNQIRIVKNISRMKKEMTIDNDTIFLDALELLGRKIEKYQKDKNGDYVKDEKGKKVYTKDYNNFQDMFFEGKNHRVRNFVSNNVIKSKWFSYVVRYNKPAECQALMRNSKLVKFALDELPDSQIEKYYISVFGEKSSSSNEEMRRELLKKLCDFSVRGFLDEIVLLSEDEMKQKDKFSEKEKKKSLIRLYLTIVYLITKSMVKINTRFSIACATYERDYILLCQSEKAERAWEKGATAFALTRKFLNHDKPTFEQYYTREREISAMPQEKRKELRKENDQLLKKTHYSKHAYCYIVDNVNNLTGAVANDNGRGLPCLSEKNDNANLFLEMRNKIVHLNVVHDMVKYINEIKNITSYYAFFCYVLQRMIIGNNSNEQNKFKAKYSKTLQEFGTYSKDLMWVLNLPFAYNLPRYKNLSNEQLFYDEEERMEKIVGRKNDSR

SEQ ID NO: 161 - DNA, 36 bp, Artificial Sequence
  DR
gtactaaagcccgctagtatagacgggttctaagac

SEQ ID NO: 162 - protein, 926 aa, Artificial Sequence
  Metagenomic hit (no protein accession): contig emb|OGDF01008514.1| (human gut metagenome assembly)
MTETKPKREDIAKTPAAKSRSKAAGLKSTFAVNGSVLLTSFGRGNDAVPEKLITEKAVSEINTVKPRFSVEKPATSYSSSFGIKSHISATADNPLAGRAPVGEDAIHAKEVLEQRVFGKTFSDDNIHIQLIYNILDIRKILSTYANNVVFTINSMRRLDEYDREQDYLGYLYTGNSYERLLDIADKYAVDGEDWRNTAAGISNDFEKKQFQTINGFWDLLDMIEPYMCYFSEAFFCETTVKDPDSGRIVPCLEQRSDGDIYNILRILSIVRQTCMHDNASMRTVMFTLGQNSVRDRKNGFDELAELLDYLYDEKIDIVNRDFLRNQKNNIELLSRIYGSSADSPERDRLVQNFYDFRVLSQDKNLGFSIKKLREKLLDSPALSVVRSKKYDTMRSKIYSLIDFMIYRKFSENHVAVDDFVEELRSLLTEDEKESAYSRWAETLINDGFAQEILVKLLPQTDPAVIGKIKGKKLLNDSIAGIKLKKDASFFTKIINVLCMFQDGKEINELVSSLVNKFANIQSFVDVMRSQGIDSGFTADYAMFAESGRISRELHILKGIARMQHSIAGLGDVKIYGSDDKFHGVSRRVYTDAAYILGFGERSEDNDGYVDDYVSSKLLGGADKNLRNFITNNVIKNRRFLYTVRYMNPKRAKKLVQNDALVVLALSGIPETQIDRYYKSCIEKRSFNPDLNEKIAALSEMITTLKIDDFEDVKQNPEKNANYEAKKNQRISKERYKACIGLYLTVLYLICKNLVKINARYSIAIGCLERDTQLHGVDFKGAAYMTRDVFIAKGWINPKKPTVKSIKEQYAFLTPYIFTTYRNMIAHLAAVTNAYKYIPQMDRFKSWFHLYHTVIQHSLIQQYEYDRDYGRKGAPVVSERVLQLLEQCREHSNYSRDLLHILNLPFGYNLPRYLNLSSEKYFDANAI

SEQ ID NO: 163 - DNA, 36 bp, Artificial Sequence
  DR
ctactacactggtgcgaatttgcactagtctaaaac

SEQ ID NO: 164 - protein, 1030 aa, Artificial Sequence
  Metagenomic hit (no protein accession): contig emb|OGPN01002610.1 (human gut metagenome assembly)
MAKKITAKQKREEKERLNKQKWAKQDTPVVPKSKTEEKPVAASDDKLLKTTQVKKVQTKSKAKAMGLKTVLSFDDKIAIASFVNDKKTKLPHIERITDKSGTTIHENARMFDSSVDEQNVNIEKRMTIEEKQNDGTFKKDEKDVKATICNPYFKTCGKDYIGIKDVAEKYFFGKTFPNENLRVQIAYNVFDIQKILGTYVNNIIYSFYNLRRDGKSDVDIIGSLYAFADFDNQLKDKPAFREAKDLLKNTEAYFSYFGDVFKKSKKGKKDENNEDYEKNLRHNFNVLRVLSFLRQICTHAYVKCTGGAKNNGDSTKVEAESLDALFNITEYFAKTAPELSKTINEIYKEGIDRINNDFVTNGKNNLYILSKVYPDMQRNELVKKYYQFVVCKEGNNVGINTRKLKESIISQHPWITTPQDNNKANDYESCRHKLYTIMCFILVAELDAHESIRDNMVAELRANMDGDDGRDAIYEKYAKDIYHIVKDKLLAMQKVFDEELVPVKVEGKNDPQQFTHGKLGKKEIESFCLSDKNTSDIAKVVYFLCNFLDGKEINELCCAMMNKFDGIGDLIDTAKQCGEEVKFIEEFACLSNCRKITNDIRVAKSISKMKNKVNIDNDIIYLDAIELLGRKIEKYQKDENGKILLGTDGKRLYTQEYKYFNDMFFNAGNHKVRNFIANNVMQSKWFFYVVRYNKPAECQIIMRNKTLVKFTLDDLPDMQIQRYYSSVFGDNNMPAVDEMRKRLLDKINQFSVRGFLDELDEIVLMSDEESKRNKSSEKEQKKSLIRLYLTIAYLITKSMVKINTRFSIACAMYERDYALLCQSEMKGGPWDGGAQALAVTRKFLNHDREVFDRYCAREAEIARLPSEERKPLRKANDKLLKQTHYTNHSYTYIVNNLNSFTDIDYCAKDVGLPAPNDKNDNASILGEMRNDIAHLNIVHDMVKYIEELKDISSYYAFYCYVLQRRLVGKDPNCQNKFKAKYAKELNDYGTYNKNLMWMLNLPFAYNLPRYKNLSSEFLFYDMEYNKKDDE

SEQ ID NO: 165 - DNA, 35 bp, Artificial Sequence
  DR
gaacccgtctatactagcgggctttagtacaaaac

SEQ ID NO: 166 - protein, 1001 aa, Artificial Sequence
  Metagenic hit (no protein accession): contig NFIR01000008.1 (Eubacterium sp. An3, from chicken gut metagenome)
MAKKLRPKELREKRRMAEKEEHKKQEKLRKEQEELRKKQEKQREDQKELEKIKKEEGGEGEKKKSGAKALGLKSTFILDRDEQKMLMTSFGRGNKAVRDKYIIGDKVSDIDDSWENKKAALSVEVCGKSFNISKKENDDCEPVKVNNPVLSGNKKDDDLIHCRKNLEEMYFGQQFKDNIHIQLIYNILDIEKILAVQINNIVFILNNLLRWSGEEEFDLIGSLGVNHTYEEFRGRNKNYGKFSELIKQSQMRYFGSTFCLFNENEERITSENKKEWKRFEKKCYHLLAVLGMMRQATAHGDSKRRAEIYKLGKEFDRLEARGCRPEARKELDELYKKKIHEMNQGFLKNSKSDILMLFRIYNAESKEAKRKLAQEYYEFIMLKSYKNTGFSIKHLRETMIDKMDEDKKEKLKDDKYNPIRRKIYRIMDFMIYQYYQEPEHQEEAEELVRKLRNAEIEAKKELAYRKEAEKLKKELEKIIFNSVLPSCDRILSEMDERRNKKVNQESSDTDKEEPLDSEIAEGITFIKETAHSFSEMIYLLTVFLDGKEINILLTQLIHCFDNISSFMDTMEEENLLTKLKEDYEIFEESKEISRELRIINSFARMTEPVPKTERIMFIEAAQILGYSNGEKELEGYVDALLDTKNKTNDKKKKGFVRYIWNNVIKSTRFRYLVRYADPKKVRAFAANKKVVAFVLKDIPDDQIRAYYNSCFRQNSDSSSNNSNASWDADSNKRDISVSDMRKALTEKITGLNFGDFEEESKKGIRKEESDKNIIRLYLTVLYLVQKNLIYVNSRYFLAFHCAERDEMLYNGETIDNNKEKGSEKDWRKFAKQFIMEHSPKKKVKDYLAKNFEYSNKWSLKEFRNSVQHLNVIRDAHKYIKYINDNKDVQSYFALYHYLVQRYISERAANRTDKESLSEGRLQYYLSQVKEYRTYCKDFVKALNVPFAYNLPRYKNLSIDELFDRNNYLPNKAKKWIPEKKENGEYVMEDCGNKDAGQVENA

SEQ ID NO: 167 - DNA, 35 bp, Artificial Sequence
  DR
gaactacactctggctgaaagtcagggtctaaaac

SEQ ID NO: 168 - protein, 1006 aa, Artificial Sequence
  Metagenomic hit (no protein accession): contig NFLV01000009.1 (Eubacterium sp. An11, from chicken gut metagenome)
MSKKQRPKDIRKRQEEEKREKYKKQEELRKKQEELRKEQEQRREDQKELEKIKKEVGEEGEKKKSRAKALGLKSTFILDRDEQKVLMTSFGQGNKAVRDKYIIGDKVSDINDDRKNKKAALLVEVCGKSFNISKKENDDCDPVKVNNPVVSRNKKDDDLIHCRKKLEELYFGEQFKDNIHIQLIYNILDIEKILAVQVNNIVFALNNLLSWSGEEKFDLIGYLGVNDTYEKFRDAKGKRKGLYEKFSTLIEKKRMRYFGSTFYPLNEKGEEITSNDKKEWEQFEKKCYHLLAVLGMMRQATAHGDSKRRAEIYKLGKEFDKSEARGCRQEARKELDDLYRKKIHEMNQSFLKNSKRDILMLFRIYDAESKEAKRKLAQEYYEFIMLKSYKNTGFSIKHLRETVIDKMDEDIKEKIKDDKYNPIRRKLYRIMDFVIYQYYQESEQQEEAMELVRKLRNAETKVEKELTYRKEAEKLKEELEKIIRNSILSVCDRILAEMNEKRHKKVNQESSDTDSEEPLDPEISEGITFIKETAHSFSEMIYLLTVFLDGKEINILLTQLIHCFDNISSFMDTMKEENLLTKLKEDYEIFEESKEISKELRIINSFARMTEPVPKTEKTMFIDAAQILGYSNDEKELEGYVDALLDTKNKTKDKERKGFEKYIWNNVIKSTRFRYLVRYADPKKVRAFAANKKVVAFVLKDIPDEQIKAYYNSCFSQNSDSSSNMSIAFQDGDSNKKGTSVHDMMRKALTEKITGLNFGDFEEESKKGIRREESDKNIIRLYLTVLYLVQKNLIYVNSRYFLAFHCAERDEVLYNGETIDNNKEKGSEKDWKKFAKEFIIEHPPKKKVKDYLAKNFEYSNKWSLRVFRNSVQHLNVIRDAYKYIKCIDDNKDVQSYFALYHYLVQRYISEMAENLTDKGELSEGRLQYYLSQVENYRTYCKDFVKALNVPFAYNLPRYKNLSIDELFDRNNYLPNKAKKWISEKKENGEYVMEDCGNKGAGQVENA

SEQ ID NO: 169 - DNA, 35 bp, Artificial Sequence
  DR
gaactacaccctggctgaaagtcagggtctaaaac

SEQ ID NO: 170 - protein, 1027 aa, Artificial Sequence
  Metagenomic hit (no protein accession): from contig emb|OBLI01020244 and emb|OBLI01038679 (from pig gut metagenome)
MAKKITAKQRREERERQNKQKWAKKQADATAVFECEADIKPADSKDEDCTNIYIKREKKKTQAKAMGLKTVLGFDNKIAIASFMSSKDSKSSHIERITDPNGKTIREDVRMFDSNVDECSINLEKRMTVEERQKDGTIKKDEKDVKSTICNPYSNECGKDYIGIKSVAEELFFGRTFPNDNLRVQIAYNIFDIQKILGTYINNIIYSFYNLSRDESQSDNDVIGTLYMLKDFDGQKETDTFRQARALLERTEAYYSYFDNVFKKIDKNKKKSDDCKRERNEILRYNFNVLRVLSFLRQICAHAQVKISNEHDREKGGGLVDSLDALFNISRFFDAVAPELNEVINSVYSKGIDDINDNFVKNGKNNFYILSKIYPEVAREDLLREYYYFVVSKEGNNIGISTKKLKEAIIVQDMSYIKSEDYDTYRNKLYTVLCFILVKELNERTTIREQMVADLRANMNGDIGREDIYSKYAKIIYAQVKPRFDTMKSAFEEEAKDVIVPDKKKPVKFSHGKLDKNEIERFCITSANTDSVAKIIYFLCKFLDGKEINELCCAMMNKLDGINDLIETAEQCGAKVEFVDKFSVLSNCETISDQIRIVKSISKMKKEIAIDNDTIFLDALELLGRKIDKYKKDATGKYLKDENGKYLYSKEYDDFQYMFFKDSHRVRNFISNSVIKSKWFSYIVRYNQPSECRAIMKNKTLVKFALDELPDLQIQRYFVALYGDEDLPSYGEMRKILLKKLHDFSIKGFLDEIVLLSDLDMESQDKYCEKEQKKSLFRLYLTIAYLITKSMVKINTRFSIACATYERDYALLCASNKQERAWSSGATALALTRRFLNQDKLIFEKHYAREGEISKLPKEERKAMRKVNDQLLKRTHFSKHSYCYIVDNVNRLTGGECRTDKRVLPVLNEKNDNAGILLDFRKTIAHLNVVHKMVDYVDEIKGITSYYAFFCYVLQRMLVGNNLNEKNAIKEKYSATVKSFGTYSKDFMWLINLPFAYNLPRYKNLSNEQLFYDEEERNETEEQIDRL

SEQ ID NO: 171 - protein, 39 aa, Artificial Sequence
  Motif 1
  MISC_FEATURE (3)..(3): Xaa can be Ile, Met, or Val
  misc_feature (4)..(4): Xaa can be any naturally occurring amino acid
  MISC_FEATURE (5)..(5): Xaa can be Asn or Ser
  misc_feature (6)..(7): Xaa can be any naturally occurring amino acid
  misc_feature (9)..(9): Xaa can be any naturally occurring amino acid
  misc_feature (11)..(11): Xaa can be any naturally occurring amino acid
  MISC_FEATURE (12)..(12): Xaa can be Ala, Ile, Leu, or Val
  MISC_FEATURE (13)..(13): Xaa can be Lys or Arg
  MISC_FEATURE (14)..(14): Xaa can be Phe, His, or Tyr
  misc_feature (15)..(16): Xaa can be any naturally occurring amino acid
  MISC_FEATURE (17)..(17): Xaa can be Ala, Pro, or Thr
  misc_feature (18)..(25): Xaa can be any naturally occurring amino acid
  MISC_FEATURE (26)..(26): Xaa can be Cys or Asn
  misc_feature (27)..(31): Xaa can be any naturally occurring amino acid
  MISC_FEATURE (32)..(32): Xaa can be Phe or Leu
  misc_feature (33)..(33): Xaa can be any naturally occurring amino acid
  misc_feature (35)..(36): Xaa can be any naturally occurring amino acid
  MISC_FEATURE (37)..(37): Xaa can be Ile, Leu, Met, or Val
  MISC_FEATURE (38)..(38): Xaa can be Ala, Gly, or Pro
  MISC_FEATURE (39)..(39): Xaa can be Asp, Glu, or Lys
NVXXXXXFXYXXXXXXXXXXXXXXXXXXXXXXXLXXXXX

SEQ ID NO: 172 - protein, 33 aa, Artificial Sequence
  Motif 2
  misc_feature (2)..(2): Xaa can be any naturally occurring amino acid
  MISC_FEATURE (3)..(3): Xaa can be Phe or Leu
  misc_feature (4)..(4): Xaa can be any naturally occurring amino acid
  MISC_FEATURE (5)..(5): Xaa can be Ile or Val
  misc_feature (6)..(6): Xaa can be any naturally occurring amino acid
  misc_feature (8)..(10): Xaa can be any naturally occurring amino acid
  MISC_FEATURE (12)..(12): Xaa can be Asn or Ser
  MISC_FEATURE (13)..(13): Xaa can be Ile, Leu, or Met
  MISC_FEATURE (14)..(14): Xaa can be Ile or Val
  misc_feature (15)..(16): Xaa can be any naturally occurring amino acid
  MISC_FEATURE (18)..(18): Xaa can be Ala, Gly, Ser, or Thr
  misc_feature (19)..(19): Xaa can be any naturally occurring amino acid
  MISC_FEATURE (20)..(20): Xaa can be Phe or Tyr
  misc_feature (21)..(22): Xaa can be any naturally occurring amino acid
  MISC_FEATURE (23)..(23): Xaa can be Ala or Gly
  misc_feature (24)..(27): Xaa can be any naturally occurring amino acid
  MISC_FEATURE (28)..(28): Xaa can be Asp or Glu
  misc_feature (31)..(32): Xaa can be any naturally occurring amino acid
  MISC_FEATURE (33)..(33): Xaa can be Phe, Leu, or Met
LXXXXXYXXXKXXXXXNXXXXXXXXXXXRDXXX

SEQ ID NO: 173 - protein, 19 aa, Artificial Sequence
  Motif 3
  misc_feature (5)..(5): Xaa can be any naturally occurring amino acid
  MISC_FEATURE (6)..(6): Xaa can be Leu or Met
  misc_feature (7)..(7): Xaa can be any naturally occurring amino acid
  MISC_FEATURE (8)..(8): Xaa can be Cys, Ser, or Thr
  MISC_FEATURE (9)..(9): Xaa can be Ala, Asn, Gln, Ser, or Thr
  MISC_FEATURE (10)..(10): Xaa can be Ile, Leu, or Met
  MISC_FEATURE (11)..(11): Xaa can be Ile, Met, or Val
  misc_feature (12)..(13): Xaa can be any naturally occurring amino acid
  MISC_FEATURE (14)..(14): Xaa can be Phe or Leu
  MISC_FEATURE (15)..(15): Xaa can be Ala, Asp, Glu, or Gln
  MISC_FEATURE (16)..(16): Xaa can be Gly, Asn, or Val
  misc_feature (18)..(18): Xaa can be any naturally occurring amino acid
  MISC_FEATURE (19)..(19): Xaa can be Asp, Glu, Asn, or Ser
KEINXXXXXXXXXXXXIXX

SEQ ID NO: 174 - protein, 18 aa, Artificial Sequence
  Motif 4
  MISC_FEATURE (3)..(3): Xaa can be Ala or Gly
  MISC_FEATURE (5)..(5): Xaa can be Cys, Asp, Asn, or Val
  misc_feature (6)..(6): Xaa can be any naturally occurring amino acid
  MISC_FEATURE (7)..(7): Xaa can be Ala, Pro, or Val
  MISC_FEATURE (9)..(9): Xaa can be Phe or Tyr
  misc_feature (10)..(10): Xaa can be any naturally occurring amino acid
  MISC_FEATURE (11)..(11): Xaa can be Asp or Asn
  MISC_FEATURE (13)..(13): Xaa can be Ser or Thr
  misc_feature (14)..(17): Xaa can be any naturally occurring amino acid
PFXYXXXRXXXLXXXXXF

SEQ ID NO: 175 - protein, 979 aa, Artificial Sequence
  Metagenomic hit (no protein accession):  contig OJMM01002900 human gut metagenome sequence
MGKHLNAKQRKLEKKLKNQQKDMMYTKSTDAVSVPTLKAAPTKAEMSQDTAEASTLITPGTLKTKAKAMGLKSTLVFDDKIVVTSFLNSKTEENEKCAHIEKIADCNGQTIVERPRMFNTSINAKKVDLSKDNDETNYPNPAFEDCGRDYINVKSALEKRVFGKTYNKDNLHVQIAYNIFDIKKIIGAYINNIIYIFYNLGREEYDAKKDIIGTQDSAYISKILNNTSAYFTYFDGVFKQITDRDSNKDREIKNSYNALVLKVLYYLRQFCMHGNTYTKRNEESFLSDTALYNAKEFFAKADPQINELIDAVYADGIKTINSDFMAHAKNNMYIICEVYKNEAEDSLMKEYYDFVVRKEGNNLGFNTRQLREILIDKYVGNLRGKKYNTFRNKLYTVLGFILVKEIKRNPKIQDSFIAKLRANQNGDEGKLNIYNEFAPKIWSVVSSKLNSAITCFDEESLSKFKGYKDIDESLISRYGITVANTDTLVKILYFLCKFLDGKEINELCCAMINKFDNINDLIKTAAQCGEDIEFVKEYKLFINSNDLSDQIRIVKSISKMKPELSKIGEALILDAIDILGYKINKYKYDAAGNRLVDSNNKPVYSEEYCAFKKDFFETCELDEFGRVKYNKKGKPVINHRRRNFIINNVLSSKWFFYVAKYNRPSECQKFMKSKKLIALVLKDVPETQIARYYQSVTGGRTQANSEAMRMTLIKLLHEFSIKNVLSDVGTMTASENKRQIENSRKERMKAIVKLYLTVVYLIAKSLVKVNTRFSIAFSAYERDVSLLADENELIALANNEDDKWKKGNYVFALTKHFWDNDEPYFDKYNNALQQIRSIVDPNERRLAYRANDKVVKHTHFNLHSYKYVKHNYEEISKASKIITAYRNNVQHLNVMNSITKYLGDISEVTSYYSLYCYTLQRLLLDDNNNDKFASIKGNLRKFGIYNKDFMWLLNIPFAYNLPRYKNLSNEEIFYDELQK

SEQ ID NO: 176 - DNA, 36 bp, Artificial Sequence
  Direct repeat
gtacaatagccctctcgtagttgagggctctgagac

SEQ ID NO: 177 - protein, 1009 aa, Artificial Sequence
  Metagenomic hit (no protein accession):  contig ODAI011611274.1 gut metagenome sequence
MKKKISLKEQRNTKKAENKLKYQKAQAERAAAAQQTAAGAESEENPCFDVVKDTKRKALNPLHVEIEAPSAKKSSVKANGLKSLLLTDGKTVMTSFGRGSEANVEKRFDETGTKTFDRDPELFSAKPLETGYRIQRFNASPKDAGLAYRPAGVRPDQIGAKAALEKRYFGKETPGDNIHVQIAYQIQDIEKLLAVYISNIIYAVNNVTGVSAMKDSKGRPVDLLGDYGILGEEGLTKRLQRIPEQADEEAKALQAFLCSERLSYFGKEFCLVRNSPKQPDKEEKRQYKLMRVLCLLGELRQFLVHGKKKEKEFAWLYRLDRQLSQEYRKLLGEFYDAQVDKVNKSFLTNSTVNLEVLFRALKTGTDPERKTVTQEYYQFTVRKEDGNLGFSLKTLREILLSAYKHEVRDKEYDSIRHKLYQLFSFALYHYYKTGVGAERREAFVAKLRAVMTAEAKQRAYADEAAEIWNDEGSGIRAAFLEILEAVDFGSAVKGIKARSSVAGDKRFAEWLEEVRIRPEGVSCFTKLMYLLTRFLDGKEINELLTGLINKLENIQSFLDVMQQEHAETGLSDAFSFFEYSGEIAAELRMTRSFARMAAADPEAKRFMVVDGAKLLGFNPKDTESEDEGIIRAIYGDACAEYLQFSEEEKEAFYVQEGLYGKEREKFSPYAYFHTDTSLRNFIAKNVVESARFRYVIRYVSPEIARKYARQEALVRFALHRVPLLQLRRYYQSCCGPKKDPDAAECVDFLAGVVNRVDFANFTDVRTGDSSKSEQEKKQKYQAIVGLYLTVVYWIVKNLVNVNSRYVMAFHILERDTVLLEGKRLFVGGMKAEDPFLLTDGYVSRQDAYVRKRIGENKRANRHGLNCVLENRNALGSDPASTDAAASLIWSYRNAAAHLTAVAAAQEYVSELREIHSYFEVYHYAMQRYLKSGAEFAELVSKNGPASGKIAAWANAVDRCHSFCKDWLWLLNVPFAYNPARYKNLSIANLFDKNEAAPVTEDASEQKEDE

SEQ ID NO: 178 - DNA, 36 bp, Artificial Sequence
  Direct repeat
gtactacacccctgcagttttgcaggggtctgaaac

SEQ ID NO: 179 - protein, 961 aa, Artificial Sequence
  Metagenomic hit (no protein accession):  contig OIZX01000427.1
MAKKKKTARQLREEMQQQRKQAIQKQQEQRQEKAAAARETAAPEQPAAAPVPKRQRKSLAKAAGLKSNFILDPQRRTTVMTAFGQGSTAILEKQIVDRAISDLQPVQQFQVEPASAAKYRLKNSRVRFPNVTADDPLYRRKDGGFVPGMDALRRKNVLEQRFFGKSFADNIHIQMIYSILDIHKILAAASGHIVHLLNIVNGSKDRDFIGMLAAHVLYNELNEEAKRSIADFCKSPRLIYYSAAFYETLDNGKSERRSNEDIFNILALMTCLRNFSSHHSIAIKVKDYSAAGLYNLRRLGPDMKKMLDTFYTEAFIQLNQSFQDHNTTNLTCLFDILNISDSARQKQLAEEFYRYVVFKEQKNLGFSVRKLREEMLLLPDAAVIADKRYDTCRSKLYNLMDFLILRVYRTGRADRCDKLPEALRAALTDEEKAVVYHKEALSLWNEMRTLILDGLLPQMTPENLSRLSGQKRKGELSLDDAMLKECLYEPGPVPEDAAPEEANAEYFCRMIYLATLFMDGKEINTLLTTLISKFENIAAFLQTMEQLNIEAELGPEYAMFTRSRAVAEQLRVINSFALMKKPQVNAKQQLYRAAVTLLGTEDPDGVTDEMLCIDPVTGKMLPPNQRHHGDTGLRNFIANNVVESRRFQYLIRYSDPAQLHQLASNKKLVRFVLSSIPDTQINRYYETCGQTRLAGRAAKVEFLTDMIAAIRFDQFRDVNQKERGANTQKERYKAMLGLYQTVLYLAVKNLVNINARYVMAFHCVERDMFLYDGELTDPKGESVSAFLAVNGKKGVQPQYLLLTQLFIRRDYLKRSACEQIQHNMENISDRLLREYRNAVAHLNVIAHLADYSADMREITSYYGLYHYLMQRHLFKRHAWQIRQPERPTEEEQKLIEQEQKQLAWEKALFDKTLQYHSYNKDLVKALNAPFGYNLARYKNLSIEPLFSKEAAPAAEIKATHA

SEQ ID NO: 180 - DNA, 36 bp, Artificial Sequence
  Direct repeat
actatagccctgccggaaatgacagggttctacaac

SEQ ID NO: 181 - protein, 963 aa, Artificial Sequence
  Metagenomic hit (no protein accession):  contig emb|OCVV012889144.1|
MSKNKESYAKGMGLKSALVSGSKVYMTSFEGGNDAKLEKVVENSEIVSLAEKESFSAEIFKKNIGCKIENKKFKHPKRYDVIADNPLYKGSVRQDMLGLKETLEKRYFNSADGTDNVCIQVIHNILDIEKILAEYITNAVYSFDNIAGFGEDIIGMGGFKPIYTYKQFKEPDKYNKKFDDILNNSRLGYYGKAFFEKNDLKHNPNKKKRDKNPYILKYDNECYYIIALLSGLRHWNIHSHAKDDLVSYRWLYNLDSILNREYISTLNYLYDDIADELTESFSKNSSANVNYIAETLNIDPSEFAQQYFRFSIMKEQKNMGFNVSKLREIMLDRKELSDIRDNHRVFDSIRSKLYTMMDFVIYRYYIEEAAKTEAENRNLPENEKKISEKDFFVINLRGSFDENQKEKLYIEEAKRLWEKLKDIMLKIKEFRGEKVKEYKKEVPRIERILPQGKDISAFSKLMYMLSMFLDGKEINDLFTTLINKFDNIQCFLKIMPLIGVNVKFTEDYAFFNKSEKIADELRLIKSFARMGEPVANTKRVMMIDAVKILGTDLSDDELVNMADSFFNDSEGNLLKKGKHGMRNFIINNVIENKRFHYLIRYGDPAHLHEIAKNEAVVRFVLGRIADIQKKQGKDGKNQIDRYYEICVGKDRGKTVSQKLDELTKIIVNMNYDQFEQKKEIIENTRTKTKYMRYDEEQKLRKDNAEREKFKKIISLYLTVLYYVVKNIVNINSRYVIGFHCLERDAQLYSEKYNKEIDKKISSLTKFCLGESDEKKLKALAKKSLEELKTTNSKLYENYIKYSDERKAEEAKRQINRERAKTAMNAHLRNTKWNDIMYGQLKDLADSKSRICSEFRNKAAHLEVARYAHMYINDISEVKSYFRLYHYIMQRRIIDVIENNPKAKYEGKVKVYFEDVKKNKKYNKNLLKLMCVPFGYCIPRFKNLSIEQMFDMNETDNSDKKKEK

SEQ ID NO: 182 - DNA, 36 bp, Artificial Sequence
  Direct repeat
catatacaaccccgtaaagttacggggttctgaaac

SEQ ID NO: 183 - protein, 911 aa, Artificial Sequence
  Metagenomic hit (no protein accession):  contig OCTW011587266.1
MKQNDRENNNKIKKSAAKAVGVKSLARLSDGSTVVSSFGKGAAAELESLITGGEIRKLSDKAILEITDDTQNKNAYNVKSSRIPNLTARTDKLSDKSGMDDLGFKRELELEVFGQCFDDSIHIQIAHAVFDIQKSLAAVIPNVLYTLNNLDRSYSTDNTSDKKDIIGNTLNYQHSYESFNVEKRGEFTEYYNAAKDRFSYFPDILCVLEKVNGKDRYQPKSEKDAFNVLSSVNMLRNSLFHFAPKSNDGKARIAVFKNQFDSDFSHITSTVNKIYSAKIAGVNENFLNNEGNNLYIILKATNWDIKKIVPQLYRFSVLKSDKNMGFNMRKLREFAVESKNIDLSRLNDKFLTNNRKKLYKVIDFIIYYHLNKVLKDSFVDDFVAALRASQSEEEKEKLYAQYSERLFADEGLKSAIKKAVDMISDTKSNIFKMKTPLDKALIENIKVNSDASDFCKLIYVFTRFLDGKEINILLNSLIKKFQDIHSFNTTVKKLSENNLIINADYVDDYSLFEQSGTVARELMLIKSISKMDFGLDNINLSFMYDDALRTLGVSDENLPEVKREYFGKTKNLSAYIRNNVLENRRFKYVIKYIHPSDVQKIACNKAIAGFVLNRMPDTQIKRYYDSLINKGATDIQAQAKALLDCITGISFDAIKDDKHLHKSKEKSPQRSADRERKKAMLTLYYTIVYIFVKQMLHINSLYTIGFFYLERDQRFIYSRAKKENKNPSKNSYLNDFRSVTAYFIPSEIMKRIEKNENKGFLEDFEALWNSCGKTSRLRKEDVLLYARYISPDHALKNYKMILNSYRNKIAHINVIMSAGKYTGGIKRMDSYFSVFQHLVQCDILSNPNNKGKCFESESLKPLLLDMKFDGTDEKLYSKRLTRALNIPFGYNVPRYKNLTFEKIYLKSSINE

SEQ ID NO: 184 - DNA, 36 bp, Artificial Sequence
  Direct repeat
cttatacaacacccattttcacagtgggtctataac

SEQ ID NO: 185 - protein, 904 aa, Artificial Sequence
  Metagenomic hit (no protein accession):  contig emb|OGNF01009141.1
MADIDKKKSSAKAAGLKSTFVLENNKLLMTSFGNGNKAVIEKIIDEKVDSINEPEVFSVTPCDKKFELQPAKRGLAADSLVDNPLKSKKTAGDDAIHSRKFLERQFFDGNTFNDNIHIQLIYNILDIEKILSVHVNDIVYSVNNILSRGEGMEYNDYIGTLNLKSFETYKNNLVNKKKFDLDRVKKIPQLAYFGSAFYNTPEDTSAKITKTKIKSNEEIYYTFMLLSTARNFSAHYLDRNRAKSSDAEDFDGTSVIMYNLDNEELYKKLYNKKVHMALTGMKKVLDANFNKKVEHLNNSFIKNSAKDFVILCEVLGIKSRDEKTKFVKDYYDFVVRKNYKHLGFSVKELRELLFANHDSNKYIKEFDKISNKKFDSVRSRLNRLADYIIYDYYNKNNAKVSDLVKYLRAAADDEQKKKIYLNESINLVKSGILERIKKILPKLNGKIIGNMQPDSTITASMLHNTGKDWHPISENAHYFTKWIYTLTLFMDGKEINDLVTTLINKFDNIASFIEVLKSQSVCTHFSEERKMFIDSAEICSELSAMNSFARMEAPGASSKRAMFVEAARILGDNRSKEELEEYFDTLFDKSASKKEKGFRNFIRNNVVDSNRFKYLTRYTDTSSVKAFSNNKALVKFAIKDIPQEQILRYYNSCFGASERYYNDGMSDKLVEAIGKINLMQFNGVIQQADRNMLPEEKKKANAQKEKYKSIIRLYLTVCYLFFKNLVYVNSRYYSAFYNLEKDRSLFEINGELKPTGKFDEGHYTGLVKLFIDNGWINPRASAYLTVNLANSDETAIRTFRNTAEHLEALRNADKYLNDLKQFDSYFEIYHYITQRNIKEKCEMLKEQTVKYNNDLLKYHGYSKDFVKALCVPFGYNLPRFKNLSIDALFDKNDKREKLKKGFED

SEQ ID NO: 186 - DNA, 36 bp, Artificial Sequence; identical to SEQ ID NO: 159
  Direct repeat

SEQ ID NO: 187 - protein, 933 aa, Artificial Sequence
  Metagenomic hit (no protein accession):  contig emb|OIEN01002196.1|
MERQKRKMKSKSKMAGVKSVFVIGDELLMTSFGDGDDAVLEKDIDENGVVNDCRNPAAYDAVYGTDSIRVKKTNNNIRAKVNNPLAKSNIRSEESALFRTRVNEYKREQKDKYETLFFGKTFDDNIHIQLISKILDIEKTFSVVIGNIVYAINNLSLEQSIDRPIDIFGDKNTQGISLREDNDYLKTMLPRCEYLFHNILNSDSDNNSKMNYNKVNKGKEEKDNRNNENIEKLKKALEVIKIIRVDSFHGVDGIKGDQKFPRSKYNLAVNYNEEIQKTISEPFNRKVEEVQQDFYRNSCVNIDFLKEIMYGSNYTDRGSDSLECSYFNFAILKQNKNMGFSITSIRECLLDLYELNFESMQNLRPRANSFCDFLIYDYYCKNESERANLVDCLRSAASEEEKKNIYFQTAERVKEKFRNAFNRISRFDASYIKNSREKNLSGGSSLPKYSFIEGFTKRSKKINDNDEKNADLFCNMLYYLAQFLDGKEINIFLTSIHNIFQNIDSFLKVMKEKGMECKFQKDFKMFSHAGHVAKKIEIVISLAKMKKTLDFYNAQALKDAVTILGVSKKHQYLDMNSYLDFYMFDNRSGATGKNAGKDHNLRNFLVSNVIRSRKFNYLSRYSNLAEVKKLAQNPSLVQFVLSRIEPSLICRYYESSQGISSEGITIDEQIKKLTGIIVDMNIDSFENINNGEIGMRYSKATPQSIERRNQMRVCVGLYLNVLYQIEKNLMNVNARYVLAFAFAERDALMLNFTLEECKKNKKRSSGGFSFIEMTQFFIDKKLFKVATEAIKKNVLKYNGNPESLNHIPGEYICKNMEGYHENTVRNFRNMVAHLTAVARVPLYISEVTQIDSYYALYHYCMQMNILQGIEQSGKILDNIKLKNALENARVHRTYSKDAVKYLCLPFAYNISRYKALTIKDLFDWTEYSCKKDE

SEQ ID NO: 188 - DNA, 36 bp, Artificial Sequence
  Direct repeat
gccccttgaccttacgaaatggtaaggttccaaaac

SEQ ID NO: 189 - protein, 1034 aa, Artificial Sequence
  Metagenomic hit (no protein accession):  contig e-k87_11092736
MKRQKTFAKRIGIKSTVAYGQGKYAITTFGKGSKAEIAVRSADPPEETLPTESDATLSIHAKFAKAGRDGREFKCGDVDETRIHTSRSEYESLISNPAESPREDYLGLKGTLERKFFGDEYPKDNLRIQIIYSILDIQKILGLYVEDILHFVDGLQDEPEDLVGLGLGDEKMQKLLSKALPYMGFFGSTDVFKVTKKREERAAADEHNAKVFRALGAIRQKLAHFKWKESLAIFGANANMPIRFFQGATGGRQLWNDVIAPLWKKRIERVRKSFLSNSAKNLWVLYQVFKDDTDEKKKARARQYYHFSVLKEGKNLGFNLTKTREYFLDKFFPIFHSSAPDVKRKVDTFRSKFYAILDFIIYEASVSVANSGQMGKVAPWKGAIDNALVKLREAPDEEAKEKIYNVLAASIRNDSLFLRLKSACDKFGAEQNRPVFPNELRNNRDIRNVRSEWLEATQDVDAAAFVQLIAFLCNFLEGKEINELVTALIKKFEGIQALIDLLRNLEGVDSIRFENEFALFNDDKGNMAGRIARQLRLLASVGKMKPDMTDAKRVLYKSALEILGAPPDEVSDEWLAENILLDKSNNDYQKAKKTVNPFRNYIAKNVITSRSFYYLVRYAKPTAVRKLMSNPKIVRYVLKRLPEKQVASYYSAIWTQSESNSNEMVKLIEMIDRLTTEIAGFSFAVLKDKKDSIVSASRESRAVNLEVERLKKLTTLYMSIAYIAVKSLVKVNARYFIAYSALERDLYFFNEKYGEEFRLHFIPYELNGKTCQFEYLAILKYYLARDEETLKRKCEICEEIKVGCEKHKKNANPPYEYDQEWIDKKKALNSERKACERRLHFSTHWAQYATKRDENMAKHPQKWYDILASHYDELLALQATGWLATQARNDAEHLNPVNEFDVYIEDLRRYPEGTPKNKDYHIGSYFEIYHYIRQRAYLEEVLAKRKEYRDSGSFTDEQLDKLQKILDDIRARGSYDKNLLKLEYLPFAYNLPRYKNLTTEALFDDDSVSGKKRVAEWREREKTREAEREQRRQR

SEQ ID NO: 190 - DNA, 30 bp, Artificial Sequence
  Direct repeat 1
gtgagaagtctccttatggggagatgctac

SEQ ID NO: 191 - DNA, 30 bp, Artificial Sequence
  Direct repeat 2
gtagcatctccccataaggagacttctcac

SEQ ID NO: 192 - DNA, 36 bp, Artificial Sequence
  Direct repeat 3
gctagggcttgtaggaattccttgctatggtacaat

SEQ ID NO: 193 - DNA, 36 bp, Artificial Sequence
  Direct repeat 4
attgtaccatagcaaggaattcctacaagccctagc

SEQ ID NO: 194 - protein, 116 aa, Artificial Sequence
  Gut_metagenome_contig6893000291
MYPFINFAIFRYYNVYHKEADYLVDSLRASMNEVEKDAVYRREAVRIWPRLKKLILNHILPEMTGSKIKEKDAKPDPEMDASMIDSVKIGTESTLFTKIIFLTTLFLNGKETNDLI

SEQ ID NO: 195 - protein, 30 aa, Artificial Sequence
  Artificial sequence
  misc_feature (2)..(6): Xaa can be any naturally occurring amino acid
  MISC_FEATURE (7)..(7): Xaa can be Phe, Trp, or Tyr
  misc_feature (8)..(10): Xaa can be any naturally occurring amino acid
  MISC_FEATURE (12)..(12): Xaa can be Asn, Gln, or Ser
  MISC_FEATURE (13)..(13): Xaa can be Ile, Leu, or Met
  MISC_FEATURE (14)..(14): Xaa can be Ile, Leu, Met, or Val
  misc_feature (15)..(16): Xaa can be any naturally occurring amino acid
  misc_feature (18)..(19): Xaa can be any naturally occurring amino acid
  MISC_FEATURE (20)..(20): Xaa can be Phe, Trp, or Tyr
  misc_feature (21)..(22): Xaa can be any naturally occurring amino acid
  MISC_FEATURE (23)..(23): Xaa can be Ala or Gly
  misc_feature (24)..(27): Xaa can be any naturally occurring amino acid
  MISC_FEATURE (28)..(28): Xaa can be Asp or Glu
  misc_feature (29)..(29): Xaa can be any naturally occurring amino acid
LXXXXXXXXXKXXXXXNXXXXXXXXXXXXD

SEQ ID NO: 196 - protein, 18 aa, Artificial Sequence
  Artificial sequence
  MISC_FEATURE (1)..(1): Xaa can be Phe, Trp, or Tyr
  MISC_FEATURE (2)..(2): Xaa can be Ile, Leu, or Val
  misc_feature (3)..(4): Xaa can be any naturally occurring amino acid
  MISC_FEATURE (5)..(5): Xaa can be Asn, Gln, or Ser
  MISC_FEATURE (6)..(6): Xaa can be Ile, Leu, or Val
  misc_feature (7)..(8): Xaa can be any naturally occurring amino acid
  MISC_FEATURE (9)..(9): Xaa can be Asp, Asn, Ser, or Thr
  misc_feature (10)..(11): Xaa can be any naturally occurring amino acid
  misc_feature (13)..(13): Xaa can be any naturally occurring amino acid
  misc_feature (15)..(16): Xaa can be any naturally occurring amino acid
  MISC_FEATURE (17)..(17): Xaa can be His, Lys, or Arg
  MISC_FEATURE (18)..(18): Xaa can be Phe, His, or Tyr
XXXXXXXXXXXFXYXXXX

SEQ ID NO: 197 - protein, 15 aa, Artificial Sequence
  Artificial sequence
  MISC_FEATURE (2)..(2): Xaa can be Cys, Asp, Asn, Ser, or Val
  misc_feature (3)..(4): Xaa can be any naturally occurring amino acid
  MISC_FEATURE (6)..(6): Xaa can be Phe, Trp, or Tyr
  misc_feature (7)..(7): Xaa can be any naturally occurring amino acid
  MISC_FEATURE (8)..(8): Xaa can be Ala, Asp, Asn, or Thr
  MISC_FEATURE (9)..(9): Xaa can be Leu or Met
  MISC_FEATURE (10)..(10): Xaa can be Ser or Thr
  misc_feature (11)..(14): Xaa can be any naturally occurring amino acid
  MISC_FEATURE (15)..(15): Xaa can be Phe, Trp, or Tyr
YXXXRXXXXXXXXXX

SEQ ID NO: 198 - protein, 940 aa, Artificial Sequence
  Ga0224415_10007274
MIEKKKSYAKGMGLKSTIVSGSKVYMTTFGDGSEARLEKVVENDSIKTLHEGEAFSAEMTDNNAGYKIGNVKFSHPNGYDVVANNPFYTGPVQQDMLGLKEILERRYFGSSTDGNNTICIQIIHNILDIEKILAEYITNAVYATNNIIDPDNDVIGGKKFTSIKTFAQFSASDSSNDFEQFLKNPRLGYLGKAFFYKDGKRNNRQKDPIECYHLLALLCGLRNWVVHNNEEKDLIKYTWLYNLDKYLDAEYITTLNYMYNDIGDELTDSFSKNSAANINYIAETLGIDPKTFAEQYFRFSIMKEQKNLGFNLTKLREVMLDRKDMSEIRENHNDFDSIRAKVYTMMDFVIYRYYIEEAAKVNAANKSLPDNEKSLSEKDIFVISLRGSFNEDQKDRLYYDEAQRLWSKVGKLMLKIKKFRGKDTRKYKNMGTPRIRRLIPEGRDISTFSKLMYALTMFLDGKEINDLLTTLINKFDNIQSFLKVMPLIGVNAKFAEEYSFFNNSEKIADELRLIKSFARMGEPVADARRAMYIDAIRILGTDLSDDELKALADSFSLDENGNKLGKGKHGMRNFIINNVITNKRFHYLIRYGNPVHLHEIAKNEAVVKFVLGRIADIQKKQGQNGKNQIDRYYETCIGKDSSKSVAEKVNALTKIITGMNYDQFDSRRNVIENTGAGNAEREKYKKIISLYLTVIYHILKNIVNINSRYVIGFHCVERDAQLYKEKGYDINLKKLKDKGFTSVTKLCAGIDEECKDVEKEMTERAKASFAALETANPKLYATYINYSDEEKNAELRKQINREKAKTALNAHLRNTKWNVIIREDLLRRDNKACKIFRNKVAHLEAIRYAHLYINDIAEVNSYFQFYHYIMQRRIMAERYDKSSGKVREYFDAVNNEKKYNDRLLKLLCVPFGYCIPRFKNLSIEALFDMNEAVKFDKEKK

SEQ ID NO: 199 - DNA, 36 bp, Artificial Sequence
  DR
caagtaaacccctaccaagtggtcggggtttgaaac

SEQ ID NO: 200 - protein, 1057 aa, Artificial Sequence
  EMG_10003641
MEETKVTKETTIEKQSTKRHKQKSKKTATKMSGLKSALVINNHEMLLTSFGKGNNAIAEKRYILDGDIETINNKNKKFDANNDSKVVVIKGISNPNGQLTNPLFDQSPTAIQPNRTSGNDMIGIRRMLERKYFVHNEENKEFQDNIRIQIAYCILDIEKILMPHINNICFEINNMLRLEGYQEDSFMGSFNLYKPYDAFIATTDDKESSRRDNFAKLMTSKQVRYLGNALYSDSLSNLTKDEILDGKRSKELKKYYQELCLLGMVRQSMIHSNQFNSSIYTLDSSYDSTMNTAELLGKGDDSSLVALATDARVEARAILDEIYKKGVDSINNSFLSNSINDLENLFKIYKCDSSEKKTELIKQYYDFCIRKPQMNMGFSITTIREGMFTRCSEANTLLLCDEGSTVKLNVHDTMKSKFYKNLDFMIYKYYKYENPEKGEKLIEDLRSKIKGKKKEDEDKKQRYAEESACILKAKRDIIKKDLTEAANKDLFADLVKSNKNEKQKFKNEYEELLKPFMIPVKVDYFSELIYLVTRFLSGKEINDLLTQLINKFENIAAFIRMYQNDQGKLEFTANYKMFEIDPQKDIPKDGKRVLSGSAKIAYYLRTINYIARMESFEIKSDKTAINDAISLLGYNSNEHRDEFITYTMAKHVVDKYQNTDYQKIVKDFLSANKTLDCKSKNMQAFVSELKNAHLSENYEQREKEIYELADTNLPAYFSEEDKEKLARYIVHSDGTYKKFLKESFYAIEELPNEGFRNFISNNVINSRRFNYIMRFCNPEKIANIGKNKVLISFALSSLAEKTDMIAKYYRVFCDRIDDQKTMEDYLVNKLTKISYTEFLNVNQKANAEKNKEKDRSQKLIGLYITLLYEIVKNLVNINSRYNIAFQRCDNDSIMILQGQYDERAVQESKLTKKFISNQKLNSYSCRYLTHNISQLDRCNDFIRQYRNKVAHLEVVSNIDEYLSGIKHIESYYALYHYLMQKCLLKNYRIEDHSQNEYKNLNDFSSKLDKHGTYVKDFVKALNVPFGYNLPRYKNLSIDELFDRNKLKTGGTIEMKGE

SEQ ID NO: 201 - DNA, 36 bp, Artificial Sequence
  DR
gaactacacccctgcagaaatgctggggtctgaaac

SEQ ID NO: 202 - protein, 973 aa, Artificial Sequence
  Ga0129306_1000735
MQKQREQQTVTDESERKKKPLKSGAKAAGLKSVFVLSEGKELLTSFGRGNEAVPEKRVTGGTIANARTDNKEAFSAALQNKRFEVFGRTAGSSDDPLAVSRAPGQDLIGAKTALEERYFGRAFADNIHMQVIYAIQDINKILAVHANNIVYTLNNLDREADPETDDFIGSGYLTLKNTFETYCDPAALNEREREKVTVSKQHFDAFMQNPRLAYYGNAFFRKLSKAERLARGREIFDKESPERRQEILGSRGKNKSVDDEIRALAPEWVKREERDVYSELVLMSELRQSCFHGQQKNSARIFRLDNDLGPGVDGARELLDRLYAEKINDLRSFDKTSASSNFRLLFNAYHADNEKKKELAQEFYRFSVLKVSKNTGFSIRTLREKIIEDHAAQYRDKIYDSMRKKLFSTFDFFLWRFYEEREDEAEELRACLRAARSDEEKEQIYAEAAASCWPSVKPFVESVAATLCDVVKGRTKLNKLKLSADESTLVRNAIDGVRISPRASYFTKLIYLMTLFLDGKEINDLLTTLIHAFENIDSFLSVLGSERLERTFDANYRIFADSGVIAQELRAVNSFARMTTEPFNSKLVMFEDAAQLFGMSGGLVEHAEELREYLDNKMLDKTKLRLLPDGKVDTGFRNFIISNVTESRRFRYLVRYCEPRAVRDYMSCRPLIRLTLRDMPDTILRRYYEQSVGAATVDRERILDTLADKLLSLRFTDFENVNQRANAERNREKQKMMGIISLYLNVAYQIVKNLVYVNARYTMAYHCAERDTELLLNAAGEGNLLRRDRSWPARLHLPRRALARRRDRVEVMERDVARGPEAYNRDEWLGLVRTLRREKRVCDNLHNNYAYLCGADAEPGDASLSLLFVYRNKAAHLSVLNKGGRLSGDLKEAKSWFYVYHFLMQRVLEEEFRNTQALPERLRELLMMAERYRGCSKDLIKVLNLTFAYNLPRYKNLSIDGRFDKNHPDPSDE

SEQ ID NO: 203 - DNA, 36 bp, Artificial Sequence
  DR
ccactacacccctgtcgaacaacgggggtctaaaac

SEQ ID NO: 204 - protein, 854 aa, Artificial Sequence
  Ga0129317_1008067
MKKQKKSLVKAAGLKSAFVVGDSVYLTSFGKGNAARLDTKINPDNSTERYVSDSEKHTLKINSITDTELRLSGPFPKQAEAKNPTHKKDNEQKNTRQDMLGLKSTLEKFYFGSTFDDNIHIQIIHNIQDIAKILAAHSNNAGYALDNMLAYQGVEFSDMIGYMGTSRTFDNYDPNHKNNKDFFRFLKLPRLGYFGSAFYSQKGKDFEKRSDEEVYNICALMGQIRQCCFHGKQEKYQLKWLYNFHNFKSNKPFLDTLDKHFDEMIDRINKNFIKNNTPDLIILSGLYPDMAKKELVRLFYDFTTVKEYKNMGFSVKKLREKMLESEEASDFRDKDYDSVRRKLYKLMDFCIYYLYYSDSERNENLVSRLRESLTDENKDIIYSKEAKIVWNELRKKFSTILDNVKGSNIKKLENVKEKFISEDEFDDIKLDIDISYFSKLMYVMCYFLDGKEINDLLTTLVSKFDNIGSIIEAATQIGINIEFIDDFKFFDRSKDISVELNIIRNFARMQAPVPNAKRAMQEDAIRILGGSEEDIFSILDDMTGYDKSGKKLAQSKKGFRNFIINNVVESSRFKYIVRYSNPQKIRKLANNSVVVGFVLGKLPDAQIESYFNSCLPNRVYSTPDKARESLRDMLHNISFNDFADVKQDDRRATPEEKVEKERYKAIIGLYLTVMYHLVKNLVYVNSRYVMAFHCLERDAMHYDVSLDNYRDLIRHLISEGDSSCNHFISHNRRMRDCIEENVKNSEQLIFGKEDAVIRFRNNVAHLSAIRNANEYIGDIREITSYFALYHYLMQRKLIDDCKVNDTAHKYFEQLTKYKTYVMDMVKALCSPFGYNLPRFKNLSIEGKFDMHESK

SEQ ID NO: 205 - DNA, 36 bp, Artificial Sequence
  DR
gaactacactactgtaattttgcagtagtctaaaac

SEQ ID NO: 206 - protein, 965 aa, Artificial Sequence
  Ga0224415_10048792
MSKKENRKSYVKGLGLKSTLVSDSKVYLTTFADGSNAKLEKCVENNKIICISNDKEAFAASIANKNVGYKIKNDEKFRHPKGYDIISNNPLLHNNSVQQDMLGLKNVLEKRYFGKSSGGDNNLCIQIIHNIIDIEKILSEYIPNVVYAFNNIAGFKDEHNNIIDIIGTQTYNSSYTYADFSKDKSDKKYIEFQKLLKNKRLGYWGKAFFTGQGNNAKVRQENQCFHIIALLISLRNWATHSNELDKHTKRTWLYKLDDTNILNAEYVKTLNYLYDTIADELTKSFSKNGAVNVNYLAKKYNIKDDLPGFSEQYFRFSIMKEQKNLGFNISKLRENMLDFKDMSVIRDDHNRYDKDRSKIYTMMDFVIYRYYIDNNNDSIDFINKLRSSIDEKSKEKLYNEEANRLWNKLKEYMLYIKEFNGKLASRTPDRDGNISEFVESLPKIHRLLPRGQKISNFSKLMYLLTMFLDGKEINDLLTTLINKFENIQGFLDIMPEINVNAKFEPEYVFFNKSHEIAGELKLIKGFAQMGEPAATLKLEMTADAIKILGTEKEDAELIKLAESLFKDENGKLLGNKQHGMRNFIGNNVIKSKRFHYLIRYGDPAHLHKIATNKNVVRFVLGRIADMQKKQGQKGKNQIDRYYEVCVGNKDIKKTIEEKIDALTDIIVNMNYDQFEKKKAVIENQNRGKTFEEKNKYKRDNAEREKFKKIISLYLTVIYHILKNIVNVNSRYILGFHCLERDKQLYIEKYNKDKLDGFVALTKFCLGDEERFEDLKAKAQASIQALETANPKLYAKYMNYSDEEKKEEFKKQLNRERVKNARNAYLKNIKNYIMIRLQLRDQTDSSGYLCGEFRDKVAHLEVARHAHEYIGNIKEVNSYFQLYHYIMQCRLYDVLKNNTKAEAMVKGKAKEYFEALEKEGTYNDKLLKIACVPFGYCIPRYKNLSMEELFDMNEEKKFKKKAPENT

SEQ ID NO: 207 - DNA, 36 bp, Artificial Sequence
  DR
caagtaaacccctaccaaatgtaaggggtttgaaac

SEQ ID NO: 208 - protein, 1022 aa, Artificial Sequence
  160582958 _gene49834
MKNSVTFKLIQAQENKEAARKKAKDIAEQARIAKRNGVVKKEENRINRIQIEIQTQKKSNTQNAYHLKSLAKAAGVKSVFAIGNDLLMTGFGPGNDATIEKRVFQNRAIETLSSPEQYSAEFQNKQFKIKGNIKVLNHSTQKMEEIQTELQDNYNRPHFDLLGCKNVLEQKYFGRTFSDNIHVQIAYNIMDIEKLLTPYINNIIYTLNELMRDNSKDDFFGCDSHFSVAYLYDELKAGYSDRLKTKPNLSKNIDRIWNNFCNYMNSDSGNTEARLAYFGELFYKPKETGDAKSDYKTHLSNNQKEEWELKSDKEVYNIFAILCDLRHFCTHGESITPSGKPFPYNLEKNLFPEAKQVLNSLFEEKAESLGAEAFGKTAGKTDVSILLKVFEKEQASQKEQQALLKEYYDFKVQKTYKNMGFSIKKLREAIMEIPDAAKFKDDLYSSLRHKLYGLFDFILVKHFLDTSDSENLQNNDIFRQLRACRCEEEKDQVYRSIAVKVWEKVKKKELNMFKQVVVIPSLSKDELKQMEMTKNTELLSSIETISTQASLFSEMIFMMTYLLDGKEINLLCTSLIEKFENIASFNEVLKSPQIGYETKYTEGYAFFKNADKTAKELRQVNNMARMTKPLGGVNTKCVMYNEAAKILGAKPMSKAELESVFNLDNHDYTYSPSGKKIPNKNFRNFIINNVITSRRFLYLIRYGNPEKIRKIAINPSIISFVLKQIPDEQIKRYYPPCIGKRTDDVTLMRDELGKMLQSVNFEQFSRVNNKQNAKQNPNGEKARLQACVRLYLTVPYLFIKNMVNINARYVLAFHCLERDHALCFNSRKLNDDSYNEMANKFQMVRKAKKEQYEKEYKCKKQETGTAHTKKIEKLNQQIAYIDKDIKNMHSYTCRNYRNLVAHLNVVSKLQNYVSELPNDYQITSYFSFYHYCMQLGLMEKVSSKNIPLVESLKNEANDAQSYSAKKTLEYFDLIEKNRTYCKDFLKALNAPFSYNLPRFKNLSIEALFDKNIVYEQADLKKE

SEQ ID NO: 209 - DNA, 36 bp, Artificial Sequence
  DR
gaactacacccctctgttcttgtaggggtctaacac

SEQ ID NO: 210 - protein, 998 aa, Artificial Sequence
  250twins_35838_GL0110300
MGNKQRVSAQKRRENAKLCNQQKARQAESQRDKIKNMNVEKMKNINTNDIKHTKTTAKKLGLKSTIIADKKIILTSFINEQSSKTANIEKVAGFKGDTIDTISYTPRMFRSEINPGEIVISKGDDLSEFANPANFPIGRDYVKIRSALEKQYFGKEFPEDNLHVQIAYNVADIKKILSVYINNIIYMFYNLARSEEYDIFYNSQSENSGRDCDVIGSLYYQASYRNQDANRFEKDGKKKAIDSLLDDTRAYYTYFDGLFSVPKREDDGKIKESEKEKAKDQNFDVLRLLSVGRQLTFHSDKSNNEAYLFDLSKLTRAAQDENRRQDIQSLLNILNSTCRSNLEGVNGDFVKHAKNNLYVLNQLYPSLKANDLIGEYYNFIVKKENRNIGIRLITVRELIIEHNYTNLKDSKYDTYRNKIYTVLNFILFREIQENSIAIKNFREKLRSTEKAEQPALYQAFANKIYPMVQAKFAKAIDLFEEQYKTKFKSEFKGGISIENMQQQNILLQTENIDYFSKYVLFLTKFLDGKEINELLCALINKFDNIADLLDISKQIGTPVVFCADYESLNDAAKIAENIRLIKNIAHLRPAIQEAQSSKDNADAAGTPATLLIDAYNMLNTDIQLVYGEAAYEELRKDLFERKNGTKYNKKGKKVDVYDHKFRNFLINNVIKSKWFFYIAKYVKPADCAKMMSNKKMIEFALRDLPETQIKRYYYTITGNEALGDAESLKGVIIEQLHAFSIKNTLLSIKNMGEGEYKIQQIGSSKEKLKAIVNLYLTVAYLLTKSLVKVNIRFSIAFGCLERDLVLQKKSEKKFDAIINEILLEDDKIRKECDKERAQAKTLPRELAQERFAQIKRRESGCYFKSYHVYDYLSKNSNEFKQNHIDFAVTSYRNNVEHLNVVHCMTKYFSEVKDVKSYYGVYCYIMQRMLCDELIIKNQDKPDVRQTFEEYNRLLKDHGTYSKNLMWLLNFPFAYNLARYKNLSNEDLFNAKNNDQKSK

SEQ ID NO: 211 - DNA, 36 bp, Artificial Sequence
  DR
gtacaatagcccgttgaaatagatgggttctaagac

SEQ ID NO: 212 - protein, 1020 aa, Artificial Sequence
  250twins_36050_GL0158985
MKKKHQSAAEKRQVKKLKNQEKAQKYASEPSPLQSDTAGVECSQKKTVVSHIASSKTLAKAMGLKSTLVMGDKLVITSFAASKAVGGAGYKSANIEKITDLQGRVIEEHERMFSADVGEKNIELSKNDCHTNVNNPVVTNIGKDYIGLKSRLEQEFFGKTFENDNLHVQLAYNILDIKKILGTYVNNIIYIFYNLNRAGTGRDERMYDDLIGTLYAYKPMEAQQTYLLKGDKDMRRFEEVKQLLQNTSAYYVYYGTLFEKVKAKSKKEQRAKEAEIDACTAHNYDVLRLLSLMRQLCMHSVAGTAFKLAESALFNIEDVLSADLKEILDEAFSGAVNKLNDGFVQHSGNNLYVLQQLYPNETIERIAEKYYRLTVRKEDLNMGVNIKKLRELIVGQYFPEVLDKEYDLSKNGDSVVTYRSKIYTVMNYILLYYLEDHDSSRESMVEALRQNREGDEGKEEIYRQFAKKVWNGVSGLFGVCLNLFKTEKRNKFRSKVALPDVSGAAYMLSSENIDYFVKMLFFVCKFLDGKEINELLCALINKFDNIADILDAAAQCGSSVWFVDSYRFFERSRRISAQIRIVKNIASKDFKKSKKDSDESYPEQLYLDALALLGDVISKYKQNRDGSVVIDDQGNAVLTEQYKRFRYEFFEEIKRDESGGIKYKKSGKPEYNHQRRNFILNNVLKSKWFFYVVKYNRPSSCRELMKNKEILRFVLRDIPDSQVRRYFKAVQGEEAYASAEAMRTRLVDALSQFSVTACLDEVGGMTDKEFASQRAVDSKEKLRAIIRLYLTVAYLITKSMVKVNTRFSIAFSVLERDYYLLIDGKKKSSDYTGEDMLALTRKFVGEDAGLYREWKEKNAEAKDKYFDKAERKKVLRQNDKMIRKMHFTPHSLNYVQKNLESVQSNGLAAVIKEYRNAVAHLNIINRLDEYIGSARADSYYSLYCYCLQMYLSKNFSVGYLINVQKQLEEHHTYMKDLMWLLNIPFAYNLARYKNLSNEKLFYDEEAAAEKADKAENERGE

SEQ ID NO: 213 - DNA, 36 bp, Artificial Sequence
  DR
gtacaatagccctgcagtaaggcagggttctaagac

SEQ ID NO: 214 - protein, 903 aa, Artificial Sequence
  31009_GL0034153
MGSRGVIIMTEKRKSRAKALGVKSAFLKDDDVIMTSFGRGNDAVVEKIIKNNEVQNINIDKPVYDVVGVEKETGIINVVGTKRGINTINKKKQYANTQVSQKRMGMDLIQRKDKLEKVFFNENFNDNIHIQLIYNILDIEKILSVYVNNIVYALGNLERDNSDDEKDLIGYASTLNSYEDFINKNLVKQNENIDKFIENGNRLGYFGNVFYKNKNELKDKKDIFDMLCLLGSLRQFCFHFKGAKFEGVEQISNSWLYNLSQLHNEFKSTLDSFYNEKIEDINGNFIEKNKVNIQILCNDLKLDKNKLVQDYYNFLISKNHKNMGFSIKKIREYILDIDYASYIKEQGYDSVRSKLFTLIDFIIYDLYVNKEKDRIDDIVSKLRGAIYDYKKDDIYKAEADWVWKKLNRQIKALTKLLSNRRIFSQDNDITNWNGVEFEKIGEQKLEDNADYFCKLMYFVTLFLDGKEINDLLTTLINKFDNIRSFIEVMEEMSLKCEFMEEYKFFNESKDICLRLKEIHSFARMKRPLDNKNVEKEMYKDAISILMKDSSIENSNIDVIFNTYIYQKDNKNAKKDFRNFIIKNVIKSNRFIYLIKYSNPTNVRKFASNTNVIKFVLGTLPDKQLERYYKSCGLSDGIGKTEWVRELSEIITGIDYSDFLNVKQRAKSKEEKEDKAKKQAIVTLYLTILYILTKNLVNVNSRYVIAVHCIERDSELYKTELYEKLKPEQPEKLYKIKPDKPLQPAQYFLFTKYLLQNDFFGEYTSKKNQYIQKNMKIYSKINKNFNVFVRYRNNIAHLNSIKNATKYVNDIGTFTSYFQLYHYIMQCDLKDWVKKEVEEKKISDKYYNYLEKYYKNNNIYLKDFVKAINVPFAYNYSRFKNLSIDKLFDKNDPRKKKWIVIFNF

SEQ ID NO: 215 - DNA, 36 bp, Artificial Sequence
  DR
gaactacacccttgttaaataacatgggtctaaaac

SEQ ID NO: 216 - protein, 951 aa, Artificial Sequence
  530373_GL0023589
MKTEMKNGEVKTSAKKENCSIAKANGLKSTFKLAENTYYMTSFGKNNTADPEKNIVRMNVENIRNTFSATPISERIVDITGETKKTAQVVLPACSDNQLHAKDTIEQMYFGKTYTDNIHIQIAYNIMDMKKIFGVYSNNIIYSINNLLEEREGSDFLGVFYTENSYQAMNFADAIIKSKLLTKNSKYLNLDMNNVWFNKEVSELSSFRKYVYSRSYANKTSTAKKICICLQEDFHFFDYATVKKAADQFTLLKRIQRSNYFFDMLCDSAGNYQCKNAQILLSILGNLRQESFHENRSTSAWMFNLEKVLTPERKKLLTALIDSRTNHINNHFIENSNKNLNAIFRLFPEKSQADLIVEYYDFSVRKAYKNLGFSVKLLREMLLKTQQELSPLNDKAYDSIRSKLYTMFDFVLYKLYVDNEEQIDQFVRKLRASTSNVEKEALYQQESERTWNEIRGQIIDNVIPFIDSIQKQENEDKLTKRIDQSIIDKAVPHFVNSRDLSYFAKVVYVVASFLDSKEINMFFDALINELENIASFNDVLEQLDMPLDYQEKYRFFERSREEAAGLRFIKSIAKMNKTRVAVKNDTKTVKLKQYCDAGAVLGEINAEKIKAAFGLGDKFNTEEARVDHTFRNFIINNVINSNRFNYVMRFMNPKSARRIMQCESLVAFSLKDIPDTQIERYCKSVNIPFDSANPNYAHMKEQLTYKLLQVQFCNFSKVSNSSHQAVEKERLKALVGLYLSVLYRIVKSIVRINTSYTIAFAAYERDCVILNRKMGKNLYGLKTDPMGITNDFMHMPTVAPSNPHNDFINETKLSKRVCALVNKNRTLCTNRTYQVYRNIIMHLNAVSAFPQYLEGLKVVHSYFDLYHYTVMMLLHRQNEKEKKRNEKEKKQNEKENNMILSTAALEKYDMVRKYQSANKDFIYAINSPLAYNAARYINLSCRTKFEEGFGK

SEQ ID NO: 217 - DNA, 36 bp, Artificial Sequence
  DR
acttaaatccccctgtaaatgcgggggttctaaaac

SEQ ID NO: 218 - protein, 928 aa, Artificial Sequence
  BMZ-11B_GL0037771
MSKDKKTKAKRMGVKALLAHGEDKLTMTTFGKGNRSKIEFTEGYHGRALETPKHFGKRGFEVRKIDENVDLYGDLEEGKTIEALLINPSEKVGEDYLKLKGTLEKRFFGREFPHDNIRIQLIYNILDIYKILGMNVADILYALGNMQDTELDIDMFGQSLNNPEKAKDVVQRMKPYMGFFGGIFRTQKKEDRKKDSNLSEEEKEEKKKKQEELLQKDLQHNMDVARCISALRHATAHNKPATAHDKQDEYPWFKSSDIYETKIFKAGMWSVIEADYKKKIQDVNKQFFSKNKVNLAILFDLLDVRDVKQKKRISDEFYRFTIRKDGKNLGMNLVKIREIIIDRYASGLRDKKHDPHRQKINVIADFLIFRALSQNQGIIDKTVSSLRLTKDEEEKDHVYQNAAELVWGMVSNCLTPYFNDPKNKYILKYKDAKTPGDFEDWITSKISEDDGEPFVKVLSFLCNFLEGKEINELLTAYIHKFECIQDFLNVISSLGENVQFQPRFALFNNASFAQNVAVQLRILASIGKMKPDLTEAKRPLYKAAIRMLCPPEKWEKYTSDEWLEKNMLLNSEDRKNDKKKKQVNPFRNFIAGNVIESRRFMYLVRYSKPKAVRAIMQNRSIVNYVLHRLPSEQIKTYSRVFPEDFSDTEAEIDFLVNKLSEFSFETFISNQQTILNNSKRGFSPNRRETAEEIERLKAITGLYLSVAYIAIKNIVKANARYYIAFAVFERDKELVKAKDARIQTTIPNTKFTNYFCLTQYYLDRDEEKKFPGDPRDKEAFFEHLRKTKRHFSKQWREWLNEKIADAKSSQATGLLLREARNDVEHLNVLRAIPDYIQDFRHGEKGETAMNSYFELYHYLMQRLMLKNTELDLSHWSGWIMRSGRPDRDLIQIAFVSLAYNLPRYRNLTKEHHFDDTVLQKIREKESLD

SEQ ID NO: 219 - DNA, 36 bp, Artificial Sequence
  DR
ggtcaacagtgtggggaattacccgcactctacaac

SEQ ID NO: 220 - protein, 940 aa, Artificial Sequence
  BMZ-11B_GL0037915
MAEHSKKTAAKRVGIKSVIAHDGGKLAVTTFGKKSAAKLAYRDGDQTPFDEEKKSELGGFNVTGVDENTVDAERGIPGEGLIEASVANPVNDLIDESRKEYGQDYLMLKDQLEKVFFGQTFPGDNLRIQIIYNILDMQKAFGLYVNDVLYAVNNLQNTGRLLTDDDWTSDVIGLALGKGRGKEIIESMSDALGFFGSAFKPIPKKPGDKTSGKYAGGKLKERDAAIAEDVAVLRVLCGLRQISAHFRSEKKGESLWASDLGVEKYFKNEMSVVDANYKARAKKIDANFMATSRANLVLLFRILNAKTKEEKEKIAVDYYKFAIRKEGKNLGVNLKKAREILLDKHYPDAKNKQFDSYRGKLYTITDFIIYRMAAEDGAFLEESVQKLRSTPSEEEKEKVYDVLAETIWNATKDDVKKVFDIRQQDIKNAAAQSLDDVNLDSVTVEKEKEFPVVKLLAFLCNFLDGKEINELLSTFVNRLENVQALIDLAKNLGETVNFSKNYAVFNDCGSGAAGRIAERLRLLASIGKMDAGLDSLKPLFIRFAIQILGGARISDEDVDAYIKENILVRKDDPEKKRSNTFRNFITNNVIKSRRFVYLVRYTKADAVRAVMKNGKIVRYVLARIPETQVDSYYKSVVDSSDAGNGKPIKEKIKALAEKLGEFSFDLIAENRDGIIDNAKLDEEKKNVEIERLKAVTGLYLTVAFIAIKNLVKANARYYIAYSAFERDSELLKEKLGEEEFYKLCIEFKNKKGETGYNNAFALLKYYIDRDEDIWRKEEATHRGRDENGKLDYDPDPRRKHYPKRRWLNILKDNLAEMERIDPTGMLAAQMRNDAMHLNAMFKIAKFVGDFRKGSSHEMRSYFELFHFLEQKTLLDSKEDFVQGMRESYGDRIRVEPCVDLIKYLYITLGYSLPRYKTMTVSGLFDPDSEDAKERAKGKRA

SEQ ID NO: 221 - DNA, 36 bp, Artificial Sequence; identical to SEQ ID NO: 219
  DR

SEQ ID NO: 222 - protein, 923 aa, Artificial Sequence
  BMZ-11B_GL0069617
MPHNKKSTIKRIGVKSAFSHGNSRLTITQFGRGNTADIAVETDSRGRSLSLPHRVEKSFTVNKIDDEIDVQRSSLLGTLLNPAENDPVDYLGLKSTLEKEFFGQEFPNDSIRIQIIHNILDIQKILGIYINDVLYSIANLQNVETVEDCLGQSLSKGQDEKLKKILNSITPYLGFLGAGFKQSERPKHQKNSRPDPRQKIEDPNWAYNKSALRILSTLRNKLAHFEDSSILFCDNLKGQFLGSNGNWITIETHYDEMITRINESFFNNSRMNLKILYLVLNAATLEDKKKITEEYYRFSILKEGKNLGVNMRKLREMMVDMFYSEIKDKQYDSYRQKIYTILDFLLFREIKDSEELETMVADLRESESDEKKEELYHDYAELFWDGVKDLIVPFFAAFDGDFTVFTTEKVPADTSKEPFLSSANTEPLVKLLAFLCNFWDGKEVNEVLSAYIHKFESIQAFIDVLESKELNEKVVFSAKKGRNFSAFNEHGFAGRVADQLRVLASIGKMKPDLEGAKRALFRDAVETLGIVENSNWLNEDGTISNDWLETYVLPGDKVTEEEKRAIKPFRNFIANNVIESRRFMYLARYAKPKSVRELMKHEEIIRYVLTRLPEKQIDTYFSNISEGDESEISRKIDTLTKALTGFSFNSLFINRDKIVENTKLDTSNKNVKIERLKALTGLYLTVAFVAVKNLVKANARYFIAFSAFERDYGFMKSHDPDVAQSCLAYEEIMDGKSKTKYNEIYALTEYYLKKEEENDYHPEPGQPFDKEACRKHLDSIRRHFTKKWRDIFRKEIDEAVKIHFTGYLGVWARNQSAHLNVLTQALPQFIGQFARNSKTGKTARMTSYFQLYHYLLQRLLCEDLNFDVPEEWKNKIQETGLPCNDLIHICFVPLGYNLPRYKNLTIECLFDEDSVSAKEGKKA

SEQ ID NO: 223 - DNA, 36 bp, Artificial Sequence
  DR
atacagcagccctacagattcgtagggttctgtgac

SEQ ID NO: 224 - protein, 993 aa, Artificial Sequence
  DLF014_GL0011914
MAKKKNAKQRREEEKNRLKAKIEKFKIKYAEQETVDKITEEIAQSDKIMRTESILVQHTKKSLAKASGVKSVFIKDDEVIMTSFGRGNDAVVEKIIKDNNVDEKNTKPAYEIVDIEKNGDLIKVQSRRCKNIESANTELPPEKIGMDLIRCKDKLEEIYFGRTFNDNIHIQLIYNILDIEKILSVYINNAVYALGNLERKENDKEKDLVGYLSARAGYNKVINKAINDEKIKDRIEDLKEFIENGNRLGYFGDIFFKKEEVSKNGKKPKKVEVLKSEKEIFDILALLGSLRQFCFHYDEAVFENEDGVIDKEYNDNSWLYNLEKLEPEFKDTLDYFYNRKINDINKGFIKTNQINLHIICDELGLNWDKEQVVGDYYDFLIAKKYKNIGFSIKKIREHMFDIYEAFDIKDKRFDSVRSIMYKIIDFVIYYSFIHYKQDEVDEIVNYLRSTLSEEQKKEKYIKLAGNIWAEYKTQFNKLKDILLANIKEFSDAKEDDVYYEEFKNFKFNEVGKEKLGENAEYFCKLMYLLTLFLDGKEINDLLTTLINKFDNIRSFVELMKEENIECIFDKKFAFFDESKNVCSTLREINSFARMQKPLNNVSVKREMYKDAIKILLKDTRAEEQNIDRILNEYIPSKEDKGIKKDFRNFIIKNIIKSNRFMYLVKYSNPTDVRNLASNRNVVKFVLNAIPDTQIDRYYKSCIQHYSNEVDKETQIQELTDIITGIDYLDFLDVRQSYRNEDKSKKQAVVTLYLTILYILTKNLVNVNSRYVIALHCLERDSKLYGYTKLSKKNNKKLEKIKPPKYHELTKYFIDNRYFDRKKKNKKYGEYTSKKISTYIETNMKNFIGCEQFRTPERYRDTQIDMFVKYRNSIAHLNAVRKASKYINDIRGFDTYFELYHYIMQRDLKDILEKIAEGAAKETEEGQKQDELLKTYFDNLDKYGTYVKDFVKALNIPFAYNYPRYKNLSIDELFDKNNTRKTIKIQDKKLEERT

SEQ ID NO: 225 - DNA, 36 bp, Artificial Sequence
  DR
gaactactacctcacagatttgtggggttcagaaac

SEQ ID NO: 226 - protein, 924 aa, Artificial Sequence
  EYZ-362B_GL0088915
MKKKLNIREQREAKKAAAKQIYAAKASAAQKKADETVVAAQPAGDTANSKPIKSRNKAAGLKSTFVVGDSLYMTSFGKGNLSVPEYRVDTGDAYRVDPISEHSELHVLGADDLAVSFSGTRRMKDVSELKADNPLHSGKNNLVPKNGTDILGLKGILEQRYYGRNFDDNVHIQIIYNILDIEKNLAIYVTNVVAALDHMCDETLDTEHEDFIGYMNTMNSFDVFMHPSQSSRADIYKKINDSRRRFENLLRTKRLGYFGFAYNPKDRNQKKRLYYLMSMIGQLRQFAFHKDSPFNRVWLYQLDEKLSKEHKDTLNYFFDQRYDEIHENFNKTNKVNLELLAEAFPSEDYATLANQYYDFTVFKAHKNLGFSIKKLREKLIENALRDEKIDSFRSKLYRLIDFCLFRIYLKDPDRAEKNVRFLRSCINEQEKEQFYTQEANALKSENPGLVNDFCMQLKDRYSSGSNSTENAEKKEDFPVFPHCHDKQKVSNVSLFAKLMYAFCLFLDGKEINELLSALLNKFDTIACMTKCTKDLGIYAPFSKDFNFFEDSEQRAEEMNLVKSIARMTKPDIQAKEQLFRDALDILGVEVGVSEEALQKEIHQYFQKGAKHDFRNFIINNVINSTRFIYVIKFCNPKTAGQIIRNENILRFVLQRMPQEQIERYYHACTKNPSLCTHDEKIQCLSNIIMEVRYKKFCNVAQKSRDTTKQMEKERFKAIIRLYLTAIYLVVKNLVNVNARYVLAFHCLERDADLFGLQIKQTLPDRKKKSDYLKLAVDQCGDNPENKPKGYLARNKRLCQCVREDIDNAKHLNGDITDYRNCVAHLNVVRNCDQYLENIDTVHSYFSLYQYLVQHYLLKRFEKDKYRCKDDLAIHYYSQVKQYRSYVKDLVKALNAPFGYNIPRFKNLTVEQLFDRNADPETITA

SEQ ID NO: 227 - DNA, 36 bp, Artificial Sequence
  DR1
gaactatagtagtgtgaatttacactactctaaaac

SEQ ID NO: 228 - DNA, 36 bp, Artificial Sequence; identical to SEQ ID NO: 130
  DR2

SEQ ID NO: 229 - protein, 1054 aa, Artificial Sequence
  Ga0099364_10024192
MSQSTKTKAKRMGVKSVLAHGKDEKGHIKLAITAFGKGNKAELAIQTDEKGSNLAKTYKERNITANKIVSEGIQTSGTIAGEGHATFLNNPAEHVGTDYLKLKETLEMEFFGKSFPGDSVRIQIIHQILDIQKLLGIYITDIIYCINNLRDETHLDHESDIVGLSMSNTNVNLALNQMRPYFGFFGEAFRPVGDDKVKEITLSDEVRKNIEKIIALEEQKRNPSTPRFKQENINLEIENAMGKFKSKDAFETAKKKYNRIVADETNAKTLRILGAMRQITAHFKDQATLFMSDVELPKILKKEFSKADWQTVEDYYAKLVDRINEGFCKNAATNVHFLTELLPEESKKQLTEDYFRFAILKEGKNLGVNMKRLREVMFALFVPELTAPETKKRYDSYRAKIYGLTDFLLFKHIHNTKQLEEWVAVLRETSNEDAKENLYDEFARTAWNTVGDSAKQLIENMQSYFTKKEKEITKTAQPVLSTSSIAHTSKKITQFSSFAKLLAFLCNFWEGKEINELLSAYIHKFENIQEFINLLEKLEGKKPQFTENYALFNEAAGQRAGEIAQNLRILASIGKMKPDLGDAKRQLYKAAIEMLGIDTEEYISDEWLEPNMLLAQPPKEPKKDNEKYRKEPHKYSYEKDMETYRKKLREYEETWRSLIDYEYLMPETNPFRNFVAKQVIESRRFMYLVRYTKPKTVRALMSNRAIVHYVLSRIADIQDHHMTESQIDRYYQNLPQYNEQQHKNVSLETKIDALADYLCKYTFEKNVLKQKNGIVLNTKSATKNVEIEHLKALTGLYLTVAYIAVKNLVKANARYYIAFSIFERDYALFEKKLGKDTLEKYVKPFKYIDKGEEKEGKNNFFALTEYLLDKDNSLRYQWNNDLSDEENKQALRKHLDKKEIRSQRHFSQYWLDIFARQIENAKKTSESGYLLTAARNCALHLNVLTALPEFVGEFRKTGDKMTSYFELYHFLLQKLMLAEAGLNLDEYRERIDTYQTACKDLINITYVSLGYNLPRYKNLTCEPLFDEESATGKERQTRLDEKSKEKKQRKGGQK

SEQ ID NO: 230 - DNA, 36 bp, Artificial Sequence
  DR
gtgcagtagccttacagattcgtagggttctgagac

SEQ ID NO: 231 - protein, 971 aa, Artificial Sequence
  Ga0187910_10006931
MIEKKKSYAKGMGLKSTLVSDSKVYMTSFGNGNDARLEKVVENNAISCLVDKKEAFVAEITDKNAGYKIINKKFGHPKGYDVVANNPLYTGPVQQDMLGLKETLEKRYFGSSVSGNDNICIQVIHNILDIEKILAEYITNAAYAVNNIAGLDKDIIGFGKFSTVYTFDEFAEPDRHKERFIKDGKLDTKLINQLKNQYDEFDAFLDDTRFGYFGKAFFCKEGDKYLNKQDNERYHILALLSGLRNWVVHNNEVESKIDRKWLYNLDKNLDKEYITTLDYMYSDIADELTKSFSKNSAANVNYIAEILNIDSKTFAEQYFRFSIMKEQKNLGFTLTKLRECMLDREELSDIRDNHKVFDSIRSKLYTMMDFVIYRYYIEEAKKIENENKTLSDDKKKLSEKDIFIISLRGSFSEEQKDKLYSDEAERLWAKLGKLMLEIKKFRGQMTRDYKKSDTPTLNRILPESEDVSTFSKLMYALTMFLDGKEINELLTTLINKFDNIQSMLKIMPLIGVNAKFSSDYAFFNNSEKIADELKLIKSFARMGEPVANAKRDMMIDAIKILGTDLDDNEIKKLADSFFKDSNGKLLHKGKHGMRNFIINNVVNNKRFHYIIRYGDPAHLHEIAKNEVVVRFVLGRIADIQKKQGKGGKNQIDRYYEICIGNGYGKSVSEKIDALTKVIINMNYDQFEAKRKVIENTGRDNAEREKYKKIISLYLTVIYQILKNLVNVNSRYVIGFHCVERDAQLYKEKGYDINTNNLESKGFTSVTKLCVGIADDDPVKYKNVEIELKERALASFDALEKENPELYEKYNMYSEKQKEAELEKQINREKAKTALNAHLRNTKWNVIIRENIRNTEKDACKQFRNKADHLEVARYAYKYINDISEVNSYFQLYHYIMQRIIIDSSGNNANGMIKKYYESVISDKKYNDRLLKLLCVPFGYCIPRFKNLSIEALFDKNEAAKYDKIKKKVAVR

SEQ ID NO: 232 - DNA, 36 bp, Artificial Sequence
  DR
catgtaaacccctaacaaatggtaggggtttgaaac

SEQ ID NO: 233 - protein, 1105 aa, Artificial Sequence
  Ga0187910_10015336
MENVKNPKEIVKGAKVRFEIYENPKPKKQNQRFSAINVEVITDETHKEAKIQKNEFKTFDQFTKELQETQKVNGETKKEHITKNKHTNVKAAGVKSVFAVDDGNVLITSFGRGNAADIETLKSDDDKTINLTETENQKKYVVTNKRSNVKGLADNPTKVESIIPGETQIGFKSILEKHFFGRTFNDNIHIQIIHNILDIKKILAVHTNNIVYALDNIHERGRENSAEKPIDMIGAGGISTSKEYEQYCSEKSDYEDNFLKQLINNERIAYFGNAFFKDEGNKKVMRTEKEIYYILGMLNEVRNVSTHFTEEDNRDWAKANLYNLSNRLKVGSKEVLNQLYKEKIDKIDANGFVNKGCKRDFSILFKSLNLTTDKDKGELVVGFYDFSIRKNYKNIGFSIKTLREYMLKISNSTLCADTISNNAIRPKAYKLYDFIIWHYYMNKPDKINDFVEKLRTQNKNDEKIKLYYDEAVCLLSELGREIHTMTSCVHNIENTSYEITDKKQKEYYKMQINSLNSADKVSDFSKVIYLVTLFLDGKEINDLLTTLINKFDNIASLLSVLEKQSGKKVEFVENYSFFNSSNLLKEKTLNKSENYTCKIVEELREINSFARMTGDCKIRKSAFEDASQLLGYHDKTVNNLFEVLRLKELESKDWKKRTDDEQQEYDRLLNKHHYFKSGKKLPDTGLRNFIINNVIESRRFNYIVRYADPKKIRKCTENNELLKFAFKDVPDSQVDRYYNICVTNKITNATREEKIERLVDIIKSMNLSKVATVKQRDKQDNVEKQKQLAIMSLYLNILYQIAKNLVYVNSRYVMAFHSLERDSQMLFDAYYDVKRGYCDLSTVLLFGVDDLQNRNRGSYKYLRDNRRSNKDVIETFGDFKGKVSKVVEKKNQGLTNEIYDSLCNVAGTTKTEVQNEIKSILKSNGLDESASSYLSHKLVNKVHSYKYLKQNLDCADNTMINQFRNNVAHLNTIRNMDGIENVTGITSYFQIYHYLMQKALYKEFKKCRENAVRKWIPYITENAEPKYVYWNKKEQQEVEVSFNPKIFGYMENIKNHSNTYCKDFVKALCAPFAYNLPRFKNLSIEELFDMHELSEEPKESMKLTD

SEQ ID NO: 234 - DNA, 36 bp, Artificial Sequence
  DR
gaacgacgtcactacacaccgagaggtgtctaaaac

SEQ ID NO: 235 - protein, 927 aa, Artificial Sequence
  Ga0187910_10040531
MAKKKKAKQRREEQEAARMNKIQSAVKAKAETAPAVSSAFVEKRKDKQSKKTFAKASGLKSTLAVDNSAVMTVFGRGNEAKLDHRINADLQSESLHPQAALKNVHAPNKQKIHFIGRMQDMNLTADHPLHSHDGERAVGADLLCAKDKLEQLYFGRTFNDNIHIQLIYQILDIQKILALHANNIIFALDNLLHKKNDELSDDFVGMGRMRATIGYDAFRNSTNQKVQETYREFQEFVRRKELLYFGSAFYNGDTRRDEKVIYHILSLAASVRQFCFHNDYTSDDGKGFIKADWMYRLEEALPAEYKDTLDALYLEGVEGLDQSFLKNNTVNIQILCSIFNHDDPNKIAEEYYGFLMTKEYKNMGFSIKKLRECMLELPELSGYKEDQYNSVRSKLYKLFDFIIAHYFRKHPEKGEEMVDCLRLCMTEDEKDSHYEGTAKKLVRELAYDMQEAAEQANGSNITQMQKNEQQGKTKGMFAIRDEIRVSRKPVSYFSKVIYVMTLLLDGKEINDLLTTLINKFENIVSFEDVLRQLNVDCTFKPEFAFFGYDRCRNISGELRLINSFARMQKPSAKAKHVMYRDALRILGLDNGMSEEALDQEVRRILQIGADGKPIKNANKGFRNFIASNVIESSRFRYLVRYNNPHKTRMIAQNEAIVRFVLSEIPDEQIRRYYDVCRDPKLPRSSSREAQVDILTGIITDVNYRIFEDVPQSKKINKDRPDANDRMTLKKQRYQAIVSLYLTVMYLVTKNLVYVNSRYVMAFHALERDAYLYGITNIKGDYRKLTDNLLADENYKKFGHFKNKKWRGIAEQNLRNSDVPVIKSFRNMAAHISVIRNIDLYIGDIQKVDSYFALYHFLMQKLIQRVVPENTKGLSDQTKKYYDALEQYNTYCKDFVKAYCTPFAYVTPRYKNLTIDGLFDRNRPGEDK

SEQ ID NO: 236 - DNA, 36 bp, Artificial Sequence
  DR
caactactaccctgccaaatggcagggttcagaaac

SEQ ID NO: 237 - protein, 900 aa, Artificial Sequence
  Ga0187911_10069260
MSTKKRFRYSVAAKAAGLKSSLAVDTDRTVMTSFGHGNAAILEKEIVDGEISVLNIENPAFDAVINDKKYALTGHHAGVHALVDQPQNRSDAVHIRGALEKKYFGDTFADNIHVQIAYNILDITKILTVYANNVVYALNNLVHADDDTQADELDSLGNFSAGTSYAKSKSKSKSKQQDFVELFIKKKEIHGYFGDTFAFLDKRIADADKEKQVYAMLACLGSLRQACSHYRIRYSVNGKNVDADADTWLFSSAQLDQTDPLFSEMLNRIYSHKIKTVNQNFFENNRKANFPILKKMYPETTLKVLMNEYYDFSIRKGYKNFGFSIKSLREALLSPQYESLIGVQIKDNKEYDTVRSKLYQLFDFALTRYFNQHPDMVDAFVVELRSLAKDEDAKNAVYEKYAKAVWNDVKQPIAVMLSYMNGSAIKNIKAFELKPDQKELNGIMNSNALDVPHFCKLVYFLTRFLDGKEINDLLTTLVNKFDNIHSFNQVLTALGLSASYEADYKIFEDSGRVVEYLREINSFARMTVDMEKIKRSAYKKALLILGSSKYSDEDLDARVDEMLGVDYNQNGEKIKVRVDTGFRNFIANNVVESSRFHYLIRYCHPRKIRNLAGNAALIEYQLRRLPELQILRYYEACTEPIKRTARTMDEKIGTLIDLIVKMDFSQFEDVQQNDRVRVFSDAEKKEKIRKMREKQRYQSIISLYLTMLYLIVKNLVNINARYVMAFQAWERDNYLLLQLSGKEAEAEYLNLTRHFIEPLDGAKPYLKKRPVEYLKKDMAMVGNSSIRHFRNATVHLNVIMEAHRYTKDIKYIGSYYALYHYILQRHLLDKIEEDSYAEKTVSEKLWESQISQYGTYSKDFVKALCCPFGYNLPRFKNLSIEQLFDRNESKEITDATAPRQ

SEQ ID NO: 238 - DNA, 36 bp, Artificial Sequence
  DR
gaactacagccctgtgaaataacggggttctaaaac

SEQ ID NO: 239 - protein, 991 aa, Artificial Sequence
  MH0288_GL0082219
MKKMTAKERREQEKQKRAEVIRGKQEANRKKAQAAATQDATAPVHHKNAKSLAKAAGLKSTFTLPTGELLMTSFGRGSEALIQKRIMKDVISDVQEGDPAFSVIPMPKQFEIQGRAIDVQKEGSSVPEVLTDDPRASQKPAGADLIGAKPALEKRYFGKTFTDNIHIQLIYRILDIKKVLAIHANNIVYTLDNLSRREGTEGTDFIGIGGLTLKNSYAAYCEPRTFFDEGKEKNIIENIEKSHGEFLEYMKNPRLAYYGEAFYRRLSNNERSKLGMERYERMSDAQRDAFDRKYPIDFCDGELHFREIEKLAPEYVRKSEKEIYYILAMLSELRQCVFHDSAASRSWLYNLEKVLPAEAMQVLDGVYSQKVAALNNFSKTSSKSNFRLLFNALHADTDAQKKQIAEDFYKFSVRKTYKNIGFSIKLLRESMLDTFAPEYKEKSYDSVRGKLYQLVDFLIWNIYDKNEKMADALVAQLRAEVKRDRDEKSPVYDREAARLWTMIREAVAQTAKTLRAVTLSNNTPGSIKIKELALSKYDRDLVENAIDSAVDERGRRLKITDEASYFSKLIYLLTLFLDGKEINDLITTLVNSFDEIDSFCCVLQKAKLDRGFTEGYRFFAHSAEISQELRAINSFARMTTETVQGKPCMFEDAADLLGMDTDLEEVREALEAFYNKEKMSLKWTKDGQEADTGFRNFIISNVLKSSRFRYVVRYGNPKKLREVMQNEAVVKFVLNDLPEEQINRYSENILGLDAAAKEKKVSELARFLRALSLEDFRDVEQSANAARNARKARYQGAMSLYLNVIYQIIKNMVYINSRYTLAFAKYEHDASLLLDNWVYDPYKTVFSDLTEDSLQKGKLNRRAAKYLQTNLEHSDNTLIRQYRNSVAHLNAVRNMNLYIGDLREITSYFGIYHYIMQRDLITRCQKVKMKNPVVVGYFDKVRTYRTCCKDLVKALNITFGYNLPRYKNLSIEGLFDKNRPGDKKESALIAE

SEQ ID NO: 240 - DNA, 36 bp, Artificial Sequence; identical to SEQ ID NO: 203
  DR

SEQ ID NO: 241 - protein, 925 aa, Artificial Sequence
  O2.UC29-0_GL0096317
MERQKRRKKSCAKMAGVKSTFVIDSDLLMTSFGERDKAVREKYIAQGNVKSLRKQEQAFDAQYGKEKIFVTNADNKLHVAINNPLCGNKKQSPEAQEYSRRVLEHKKAINQKYETIVFGKPSNDNIHIQVVSKIMDIEKTFSFVMGNIVYAINNLDPEQNIDNPIDYMSNKARTDENLKRVLRRCMYLFDLGFEYAEPSPYKKSEQQIEQEREEREKENLETLKKALDVISVMRTDSFHGYDMCNSTSAIVKFPSKKFNLDQKGKNLIYRNAFKYKTDTIKKQYAQNSKVNINFLSYVLYGNGCTEEQKKELSREYFNFAILKQYKNLGFSITSLREQLLSLYDIDFECKRNLRSRANSFCDYVLYYRYAVQFPERIVDLVDKLRCSANEKEKTNVYIEEANRIKEDLRIAFNRINNFDAKSIKLYSTKNNVDDQPMLPFEQVSKDIKGGDAAREKADAFCDMTYYLTQFLDGKEINVFLTTLHNLFENIASFLDVMHKQNISYDFTEQYVMFYDSAYIVKKLETVISVSRMKKALDFYNGQALRDAIRVLGISERHVDMDMKEYVDKYLFDDCKDVKHADHNLRNFIVTNVIKSRKFNYLARYSDMATVSKLSKNKEVVKFVLKRVDPKQIERYYRSVCDVRNISAEDEIEKLVDIIYNFNIDELEQVNNAEIGTGHSGRKVASKRSVQERNQARACVSLYLNVLYQIVKNLMNVNSRYSIAFAMTERDMIVEGKGIEAIETFKDDPDAGKKSKKQIAYRTKYIALTEEYLDKGYIKCATERIKENIKKYGGDPKSIDHIPGEYIKKNLEGYCAGSTNTFRNAVAHLALMARVSEYASDIKNVNSYFSLYHYCMQKHILYCARRFNKQGNEKMAAALNDAEIHRSYSKDAVKFLCLPFAYNLPRYKALTVEGLFDWNEYGQDDD

SEQ ID NO: 242 - DNA, 36 bp, Artificial Sequence
  DR
gtactaagaccttactaaatggtaaggttccaaaac

SEQ ID NO: 243 - protein, 954 aa, Artificial Sequence
  PIG-014_GL0226364
MTKPEKKQIKQATLTKRMGLKSTLVFDNKITVTSFANSSNSEKASAHIEKRTDFWGKTIMQDEKMFRTDVEKQQIYIEKEFPDENNKIITQTAMFENPALRNCGKDYIGMKNSVEKVMFGKEFPNDNLHIQIAYNILDIKKIICPYINNVVNIFYNLGRGKLKDDKNDLLGKQIGPKSEEMVEDLLKNSSAYFVYFGDVFKQVKLSKEQQEKSEEEKRRIWQELWNKNFDHNKNIVNSLIKFRQMCFHQNYENSDKEVSSTALFNIEQFLNKEEKASLDEIYTGAIDKVNCDFNKNSSNNLYILEQIYCNDKNLGQRYYDFVVKKSQCNLGLDTKLIRELLIRKLSDEGLDINDSRYDTYRNKIYTVFGFILYYELTKNETFCQEIVAKLRRFGGDEIEKNKIYNEYFLRKEAVYNQIAEKFKQSVCWFKKEKEKKKEFSSKTKIDLRSVQKIEDQNASVFAKMVYLISRFLDGKEINELCTKLLNKFKNINELVETAKRCGETIEFCPEYKMFKNSAKLAEEMRFVQSVSKMKKLTKKEDKSIKPQVIDDALELLGLKIEKYKKDDQGNFVLDDQNHNVWTDEYKSYRKECFTPKNSDSMNDAEKSFVAKGHQKRNFIISNVVLNKRFLYVAKYGSPTACNQMMKNQKIVRMALESISEDQLRKYARRVYDNKEHFQNQTADEIRENLAKKLKNFNIGAELKTVGNLSEKDFRSSKNALKDKSKSLIGLYLTVAYLITKNMIKINTRFSIAFGAYERDMEFLLQQKKEKGKRFDWLALTQKFLSEDKNYYFEHDLRRKEINKISDRDERKKQHRENDKYYDSCMHFSRHSFEYISKNFAEVQSHPDPLKLFIKYRNNVMHLNIIRDLNDYLPDFKRGKAFEKTDTFYDLYCYCLQKMLLSEVDGFSAINENIDKYCTASKDFMNLLNIIFAYNVPRYKNLSNKELFYRLDSEQ

SEQ ID NO: 244 - DNA, 36 bp, Artificial Sequence
  DR
gtacaaaagccctccagtttggacgggttctaagac

SEQ ID NO: 245 - protein, 941 aa, Artificial Sequence
  PIG-018_GL0023397
MAKKLSPRELREQRERERQAKFAKQVQEREAEKAKREKQVSVSDTVGAAAAVQNENGKKSMAKAAGVKSVFAVGDTVYMTSFGRGNDAVLEKKIVDESHESLNKANPAYEITDISSVNYSVEGHRGQSVCATADNPLHHDGGSSVPTDMLCLKPTLERVYFGKTFDDNLHIQLIYNILDIEKILAIYSTNAVYALNNMIADEDDESSDLFQNMTTDYTYDKFRGRSERIVKSFNDFVSNPRLAYYSDAFYEKKGKGSKRRSEKEIYSMLAMLGKLRHWCVHSESGEAEFWLYKLDSLNGEFIDVLNTLYNRSVNEINRGFVDTNKVNIQILQAVCKNMDLISLIKAYYEFLITKKYKNMGFSIKKLREMMLAETAYTSNPDDRLYDKEINSVRNKLYQMTDFIIYLEYRDNKSIIDTLVSKLRSSVTDEAKEAVYREEAANLRGRLLDAVALIAKSLNGVNIKKLQQNTLEIPDSKLENCFIKSAEKVSAFTKLNYLLTRFINGKEINDLLTTLINKFDNIRSFLETMDELGLERTFTENYRFFEDSQKYRDELIELNSFAKSCSFDISAKRIMYRDALDILGIQAELSEDEIGRMIDNILQLDANGERISKNQRENGLRNFIASNVIDSNRFKYLVRYGNPKKIRETAKCPPAVKFVLDGIPDSQIERYYNSCFPEDTAICSADKKRRELAEMISNISFDWFKDAGNVQRVNAEDKSRNAEIKRKNQAIIRLYLTVMYLMLKNLVNVNSRYVIGFHCVERDAKLYKLSGLTIEGNTDKNRTLLTATILGITSADRAPSGEIVADCDLGRAETAANRHLRKKRWYVQIFNNLKQADRNVINEFRNSVCHLNAIRNINTNIEGIGFVKNYFALYHYLIQRHISSKRISFNSFSAEYISNLEKYHTPSEYFIKAYCTPFAYNLVRYKNLTIDGLFDRNAPSEK

SEQ ID NO: 246 - DNA, 36 bp, Artificial Sequence
  DR
gaactacacccctgttaaattgcaggggtctaaaac

SEQ ID NO: 247 - protein, 948 aa, Artificial Sequence
  PIG-025_GL0099734
MAKKMNAKEQRAAIQAEKNKKIQMANAAREKQAEEARLKAEAERIEKEENKKREAELKRFKLDQETRGKLPKNERKSLAKAAGLKSTFAVGTDLYMTSFGKGNDAIVEKKISNKQVTQINTEKENFTVDTDGITDTIVPVQSKRIACLNTQADNPLYRKDSENQVQPDKLLLKDTLEKVYFGKTFNDTLHIQLIYNILDIQKILTVYSVNTVYTLNNLFGKEISERGDFIGALSFQQTYDDYTSDSKNKEIFEDFYSKRSLGYYGHIFFKDKKKRSKREIYDILALIATIRQWCIHSEEDKKTWIYNAENVLDSEYLDILDDVYGGLVEKINKNFIKDNKVNLILLSDILDMKSKDDFEELIRQYYRFIITKEQKLLGFSITKIREAMLEDTVFKTDKKYDSIRSKLYKLIDFMMFYKYTTVDSEKEHADSIVEKLRATLSGESKEEIYKAEANRIWNLYEDIIMNKIEPALDEGVISGLKKNKSYDNMSIEGIVAEETANVSYFSKIIYLLAQFIDGKEVNDLTTTLINKFDNIRSFIDTANQIGLECNLLDEYQFFNTSDTVKKELHVIKNLTGMGYYDVSIKHQMYKDAIDILGLHDNLSDEEINQLIDTNILFIGADGKPVKMAKGKRGFRNFIISNVLKSSRFRYLVKYCNPKKIRKIANNEKIVKFVLGRITETQIERYYYSCNPELKRAAYPGREAAIDDLTKIIINMKFDDFKNVKQSANVEDSSKEAQEKMKYQTIISLYLTVCYHLVKNLVNINARYAMAFHSLERDARLYGIYGSEKDYVEKLKKEQAVLVEKLLSDGPETAGNLHLRSKKWNRLMRVNLENYSAAASQNFRNAVAHLNPIRNADVLIEGIENITSYFDIYHYIVQRSVLNRTNKTPKMKEYEELINKYHTYNKDFVKALCAPFGYNVVRFKALTIYEMFDRNYPEEKRAEEARKSC

SEQ ID NO: 248 - DNA, 36 bp, Artificial Sequence
  DR
taatatgccctatatcaatttataggggttcagaac

SEQ ID NO: 249 - protein, 894 aa, Artificial Sequence
  PIG-028_GL0185479
MSESDKIKIKSKKTRTKRAGLKSSFVSEGKGLMTAFGKGNNAVIEKRISGDLIENVSNKPRFSVEFGNKEYIINDKKLGIVSDDPRESQKPVGEDGIHCKRALEERYFGKTFNDNIHIQLIYSILDLEKILAVHSNNIVYTFDNLRRKETDEYDDFIGYMSTVNSYEEFISPEKLLPGKEQSVYDNINRSQETFLEYRKNPRLGYFGKVFYEKSTDAKDKNKKKMRLISEKEMYYIFALLGGLRQFCTHDKNRARNWLYSLDTMLNDDAKAVLDKYYVSTVSSLNKHFVENSAKKDFSIIFNALNITDIELKKNIAKEYYEFVCRKNFKNIGFSIKKLREYLLEKPEFRNLKDDKYNSVRSKLYRLIDFIIYLNYKDAKFKNDNDEKIERFVSKLRKCPDEASKETVYQTEADIIKKSISGSINSIKRDMMLVKSKYGKLELDTQTVNQLKRAVDDISINTKGDYFTKLMYLISLLIDGKEINDLLTTLIHQFENIASFIDVMKKENIECEFTEKFAFFKNSEIIAHELRTVNSFARMTGFMENDESTKFIMFREAADILGTSYTDDELTDHLNLKKTRLIARSKADMGLRNFIISNVIKSSRFKYLIRYSNPKKVKAIAENKKLVSFVLDKIPDTQIIRYCNTCGFKVGKRQENINTLAEAITYFSFSNFEKVKQSANVENDTPDAIDKAQKQGLISLYLTVLYLFIKNMVYVNSRYVLAFHCLERDSQLLKITSGYNNLSYNNLTNHFIEKEYLNSHARNYLRVNISNSDEWSIVKFRNGVAHLNSVRNIDTSIKGLREFKSYFEIYAYTVQKSIKNYYDAESPVQINPKTIEYMESVDKYGSYTKDFVKALNTPFGYCLARYKNLSIEPLFDRNTVYNKKDVKEEFAVNSK

SEQ ID NO: 250 - DNA, 36 bp, Artificial Sequence
  DR
gaactatagccctccgatttcggagggttctgaaac

SEQ ID NO: 251 - protein, 980 aa, Artificial Sequence
  Ga0224422_10645759
MDKYKLLRNQKFDYVIKLDNIDNIRPILCKEIVNKILKKLKLDFFFSTKEKEIHFTADDIITKKYKKIELVGDDKEVFPIYVRLREVPLKGKAKRLGLKSIFVEDNKLILTTIGKKDDVLIEKEILNNSKNEVISHINPENYAVQEVNYKNISLANDKLKADIDNPSHSKVEETISIKKDYLERKDVIEKKFFNNTFNDNIHIQLAYNIMDINKIFNIYSNEVVFTMENLAHSDDAKDFIGGIDYKKDVIQNAKFNDYFASIFNSLRYFSQAFPNKTFDKIKIDGEKDYNREEIKKNTKIILRILSMFRQFSIHGYTDLFDMEKDPKIRDLLDYFTARYDEVYNNLIRNFIKTSKTNIAIVFEALNLPINDNGLKKEILNDYFDFSITKSYVNMGFNFKRLKEVLISKLGLNVSDSNKQATYNVINYLIYRHLKDNPIVDKYVKCLVASEGDLDKIAIYDAFADEIKLPLKNIITQELVDNQKRNQKYKYFNIDGSWLNTNFNNIDPFCKAIYFLTIFLDTKEINMLVTSIVNKLRNINGLVKVLNNKSDLIYDYRIFDKGNAQKIADQLSVVLSIARMQKNFNKKFKSDNKNSANKPSSDMIYDAYCLFGYKESKETFDEELEADTSKPSKGIAKFQNKITSAIVNSNKFRFIIKYANPRNCYSIMKNTRVVSFVLKEIPQSQIDKYIIKKEKYNSLNYDAKINALAKELADVSIYGMRKAYNIRAKVEANNLELPKLFMTIIYQVIKSLVRINTYYNIAFSCLERDKKLFNVPDDYCDYSDLMLLDAFVYGTNEFEVSKDGKCECITIDVPLNKYERKVDGKIISVQGTKLGSSKYSWLKDDIDVFKEIFYMNNKPTEIESCSVIYRACYRNTIAHLNAISNMTSYLASFVGRNNRMNSYFELYQYIIQMNFINKYKDNYSNEFIDKQSEILKKYKTYSKDLLHILNLPLAYNMARYKNLTIEDIFYDKFINYIKKSE

SEQ ID NO: 252 - DNA, 36 bp, Artificial Sequence
  DR
ggacaataacctgcgaattttggcaggttctatgac

SEQ ID NO: 253 - protein, 996 aa, Artificial Sequence
  ODAI chimera
MLKKCSVCGKKFETNYQGGKPVCRNCRSNKSKPVNPKSSRKPESIDKAIEILTEKLISDCKKNDCASECGKGRRKSKAKAAGLKSALDLGNGQALITSFGKGNEAVPEKRVEGDKIISLREGEAFALAKEPVNHKLVLKSGRIKAEGGPVEFDGPQKNSSMSAVRLDEYNNQIERKFFRGNKVLQDNIRIQIAHNIMDIEKILAVHINNIVYSVNNLFRVQGNEGDDFLGYRGLDKNYSDFCKNKPEDKERFFNFIGKGDGKVTNPRLSYYGAAFAEKVQPTLKYREAEDIYYIICMLGEARQMFAHGNDDRTKTFLYNIVGYRNGTEINSKFTAVLDGIYSKKVEELNGNFIKNSKKDLTILFSAFGCQDEASKKKLIEKYYDFIVKKTNKNMGFSVTKLREKIIEGYRFRGNPVTGTDYDSVRHKLYRTFDFIICSYYDDHAKEKDTLVSSLRASLNDTKKENLYAGEAKTIAESIKDRMDTVCRMYNKGEGIKHITVDRFIAGAGAGKLIDKCSISTECDYFCKFIYLMTLFIDGKEINDLLTTLINKFDNIDSPSVDKAVNNQNRVEFGDKYDMFNKAGEICESLRSINSFARMESPAPAAKRTMFVDAIRMFGFADVSDNDAEKFYKENIEPFIYDRNGDIEDEWKKGKLVHKKDEKKKGVYNFIATNVIESNRFQYLVRYANTEKIAALARNETIVRFVIKKLPAAQIVRYYIACNRIRENINSNVLTSDDMAESLVKLVTGMDFGKIKGVRNDDRSGDKEMKKAIVTLYLTILYHLTKNLVYVNSRYFMAFHCLERDMNLFGEGQKQALRNTGDYPADNADLRRRDIKYCVLTKAHIKQEEVKSRRNDTDSKSQQKAKSRRRRWCLLLKEDIDKLNGCESLRILYRNAVAHLNIPRNAIDYIGGIKKADSYFAIYHYMMQQYLSKKHGLPEGLGCTHGVYCKDLVKALNAPFGYNLPRFKNLSVEALFDMNEEPAPEGKERSKNADGCN

SEQ ID NO: 254 - DNA, 36 bp, Artificial Sequence; identical to SEQ ID NO: 159
  DR

SEQ ID NO: 255 - protein, 6 aa, Artificial Sequence
  HEPN motif
  misc_feature (2)..(5): Xaa can be any naturally occurring amino acid
RXXXXH

SEQ ID NO: 256 - protein, 11 aa, Artificial Sequence
  N-terminal NLS
SPKKKRKVEAS

SEQ ID NO: 257 - DNA, 33 bp, Artificial Sequence
  N-terminal NLS
agccccaagaagaagagaaaggtggaggccagc

SEQ ID NO: 258 - protein, 11 aa, Artificial Sequence
  C-terminal NLS
GPKKKRKVAAA

SEQ ID NO: 259 - DNA, 20 bp, Artificial Sequence
  dCas9 target
uuaucgucuguuuguggaug

SEQ ID NO: 260 - DNA, 33 bp, Artificial Sequence
  C-terminal NLS
ggacctaagaaaaagaggaaggtggcggccgct

SEQ ID NO: 261 - protein, 915 aa, Artificial Sequence
  Mutated Cas13d sequence, NLS-Ga_0531(trunc)-NLS-HA
MSPKKKRKVEASKQSKKTFAKASGLKSTLAVDNSAVMTVFGRGNEAKLDHRINADLQSESLHPQAALKNVHAPNKQKIHFIGRMQDMNLTADHPLHSHDGERAVGADLLCAKDKLEQLYFGRTFNDNIHIQLIYQILDIQKILALHANNIIFALDNLLHKKNDELSDDFVGMGRMRATIGYDAFRNSTNQKVQETYREFQEFVRRKELLYFGSAFYNGDTRRDEKVIYHILSLAASVRQFCFHNDYTSDDGKGFIKADWMYRLEEALPAEYKDTLDALYLEGVEGLDQSFLKNNTVNIQILCSIFNHDDPNKIAEEYYGFLMTKEYKNMGFSIKKLRECMLELPELSGYKEDQYNSVRSKLYKLFDFIIAHYFRKHPEKGEEMVDCLRLCMTEDEKDSHYEGTAKKLVRELAYDMQEAAEQANGSNITQMQKNEQQGKTKGMFAIRDEIRVSRKPVSYFSKVIYVMTLLLDGKEINDLLTTLINKFENIVSFEDVLRQLNVDCTFKPEFAFFGYDRCRNISGELRLINSFARMQKPSAKAKHVMYRDALRILGLDNGMSEEALDQEVRRILQIGADGKPIKNANKGFRNFIASNVIESSRFRYLVRYNNPHKTRMIAQNEAIVRFVLSEIPDEQIRRYYDVCRDPKLPRSSSREAQVDILTGIITDVNYRIFEDVPQSKKINKDRPDANDRMTLKKQRYQAIVSLYLTVMYLVTKNLVYVNSRYVMAFHALERDAYLYGITNIKGDYRKLTDNLLADENYKKFGHFKNKKWRGIAEQNLRNSDVPVIKSFRNMAAHISVIRNIDLYIGDIQKVDSYFALYHFLMQKLIQRVVPENTKGLSDQTKKYYDALEQYNTYCKDFVKAYCTPFAYVTPRYKNLTIDGLFDRNRPGEDKGSGPKKKRKVAAAYPYDVPDYA

SEQ ID NO: 262 - protein, 919 aa, Artificial Sequence
  Mutated Cas13d sequence, NES-Ga_0531(trunc)-NES-HA
MLQLPPLERLTLGSGKQSKKTFAKASGLKSTLAVDNSAVMTVFGRGNEAKLDHRINADLQSESLHPQAALKNVHAPNKQKIHFIGRMQDMNLTADHPLHSHDGERAVGADLLCAKDKLEQLYFGRTFNDNIHIQLIYQILDIQKILALHANNIIFALDNLLHKKNDELSDDFVGMGRMRATIGYDAFRNSTNQKVQETYREFQEFVRRKELLYFGSAFYNGDTRRDEKVIYHILSLAASVRQFCFHNDYTSDDGKGFIKADWMYRLEEALPAEYKDTLDALYLEGVEGLDQSFLKNNTVNIQILCSIFNHDDPNKIAEEYYGFLMTKEYKNMGFSIKKLRECMLELPELSGYKEDQYNSVRSKLYKLFDFIIAHYFRKHPEKGEEMVDCLRLCMTEDEKDSHYEGTAKKLVRELAYDMQEAAEQANGSNITQMQKNEQQGKTKGMFAIRDEIRVSRKPVSYFSKVIYVMTLLLDGKEINDLLTTLINKFENIVSFEDVLRQLNVDCTFKPEFAFFGYDRCRNISGELRLINSFARMQKPSAKAKHVMYRDALRILGLDNGMSEEALDQEVRRILQIGADGKPIKNANKGFRNFIASNVIESSRFRYLVRYNNPHKTRMIAQNEAIVRFVLSEIPDEQIRRYYDVCRDPKLPRSSSREAQVDILTGIITDVNYRIFEDVPQSKKINKDRPDANDRMTLKKQRYQAIVSLYLTVMYLVTKNLVYVNSRYVMAFHALERDAYLYGITNIKGDYRKLTDNLLADENYKKFGHFKNKKWRGIAEQNLRNSDVPVIKSFRNMAAHISVIRNIDLYIGDIQKVDSYFALYHFLMQKLIQRVVPENTKGLSDQTKKYYDALEQYNTYCKDFVKAYCTPFAYVTPRYKNLTIDGLFDRNRPGEDKGSGLQLPPLERLTLYPYDVPDYA

SEQ ID NO: 263 - protein, 1000 aa, Artificial Sequence
  Mutated Cas13d sequence, NLS-RfxCas13d-NLS-HA
MSPKKKRKVEASIEKKKSFAKGMGVKSTLVSGSKVYMTTFAEGSDARLEKIVEGDSIRSVNEGEAFSAEMADKNAGYKIGNAKFSHPKGYAVVANNPLYTGPVQQDMLGLKETLEKRYFGESADGNDNICIQVIHNILDIEKILAEYITNAAYAVNNISGLDKDIIGFGKFSTVYTYDEFKDPEHHRAAFNNNDKLINAIKAQYDEFDNFLDNPRLGYFGQAFFSKEGRNYIINYGNECYDILALLSGLRHWVVHNNEEESRISRTWLYNLDKNLDNEYISTLNYLYDRITNELTNSFSKNSAANVNYIAETLGINPAEFAEQYFRFSIMKEQKNLGFNITKLREVMLDRKDMSEIRKNHKVFDSIRTKVYTMMDFVIYRYYIEEDAKVAAANKSLPDNEKSLSEKDIFVINLRGSFNDDQKDALYYDEANRIWRKLENIMHNIKEFRGNKTREYKKKDAPRLPRILPAGRDVSAFSKLMYALTMFLDGKEINDLLTTLINKFDNIQSFLKVMPLIGVNAKFVEEYAFFKDSAKIADELRLIKSFARMGEPIADARRAMYIDAIRILGTNLSYDELKALADTFSLDENGNKLKKGKHGMRNFIINNVISNKRFHYLIRYGDPAHLHEIAKNEAVVKFVLGRIADIQKKQGQNGKNQIDRYYETCIGKDKGKSVSEKVDALTKIITGMNYDQFDKKRSVIEDTGRENAEREKFKKIISLYLTVIYHILKNIVNINARYVIGFHCVERDAQLYKEKGYDINLKKLEEKGFSSVTKLCAGIDETAPDKRKDVEKEMAERAKESIDSLESANPKLYANYIKYSDEKKAEEFTRQINREKAKTALNAYLRNTKWNVIIREDLLRIDNKTCTLFRNKAVHLEVARYVHAYINDIAEVNSYFQLYHYIMQRIIMNERYEKSSGKVSEYFDAVNDEKKYNDRLLKLLCVPFGYCIPRFKNLSIEALFDRNEAAKFDKEKKKVSGNSGSGPKKKRKVAAAYPYDVPDYA

SEQ ID NO: 264 - protein, 980 aa, Artificial Sequence
  Mutated Cas13d sequence, NLS-RfxCas13d(del5)-NLS-HA
MSPKKKRKVEASIEKKKSFAKGMGVKSTLVSGSKVYMTTFAEGSDARLEKIVEGDSIRSVNEGEAFSAEMADKNAGYKIGNAKFSHPKGYAVVANNPLYTGPVQQDMLGLKETLEKRYFGESADGNDNICIQVIHNILDIEKILAEYITNAAYAVNNISGLDKDIIGFGKFSTVYTYDEFKDPEHHRAAFNNNDKLINAIKAQYDEFDNFLDNPRLGYFGQAFFSKEGRNYIINYGNECYDILALLSGLRHWVVHNNEEESRISRTWLYNLDKNLDNEYISTLNYLYDRITNELTNSFSKNSAANVNYIAETLGINPAEFAEQYFRFSIMKEQKNLGFNITKLREVMLDRKDMSEIRKNHKVFDSIRTKVYTMMDFVIYRYYIEEDAKVAAANKSLPDNEKSLSEKDIFVINLRGSFNDDQKDALYYDEANRIWRKLENIMHNIKEFRGNKTREYKKKDAPRLPRILPAGRDVSAFSKLMYALTMFLDGKEINDLLTTLINKFDNIQSFLKVMPLIGVNAKFVEEYAFFKDSAKIADELRLIKSFARMGEPIADARRAMYIDAIRILGGGGGSGGGGSMRNFIINNVISNKRFHYLIRYGDPAHLHEIAKNEAVVKFVLGRIADIQKKQGQNGKNQIDRYYETCIGKDKGKSVSEKVDALTKIITGMNYDQFDKKRSVIEDTGRENAEREKFKKIISLYLTVIYHILKNIVNINARYVIGFHCVERDAQLYKEKGYDINLKKLEEKGFSSVTKLCAGIDETAPDKRKDVEKEMAERAKESIDSLESANPKLYANYIKYSDEKKAEEFTRQINREKAKTALNAYLRNTKWNVIIREDLLRIDNKTCTLFRNKAVHLEVARYVHAYINDIAEVNSYFQLYHYIMQRIIMNERYEKSSGKVSEYFDAVNDEKKYNDRLLKLLCVPFGYCIPRFKNLSIEALFDRNEAAKFDKEKKKVSGNSGSGPKKKRKVAAAYPYDVPDYA

SEQ ID NO: 265 - protein, 965 aa, Artificial Sequence
  Mutated Cas13d sequence, NLS-RfxCas13d(del5.12)-NLS-HA
MSPKKKRKVEASIEKKKSFAKGMGVKSTLVSGSKVYMTTFAEGSDARLEKIVEGDSIRSVNEGEAFSAEMADKNAGYKIGNAKFSHPKGYAVVANNPLYTGPVQQDMLGLKETLEKRYFGESADGNDNICIQVIHNILDIEKILAEYITNAAYAVNNISGLDKDIIGFGKFSTVYTYDEFKDPEHHRAAFNNNDKLINAIKAQYDEFDNFLDNPRLGYFGQAFFSKEGRNYIINYGNECYDILALLSGLRHWVVHNNEEESRISRTWLYNLDKNLDNEYISTLNYLYDRITNELTNSFSKNSAANVNYIAETLGINPAEFAEQYFRFSIMKEQKNLGFNITKLREVMLDRKDMSEIRKNHKVFDSIRTKVYTMMDFVIYRYYIEEDAKVAAANKSLPDNEKSLSEKDIFVINLRGSFNDDQKDALYYDEANRIWRKLENIMHNIKEFRGNKTREYKKKDAPRLPRILPAGRDVSAFSKLMYALTMFLDGKEINDLLTTLINKFDNIQSFLKVMPLIGVNAKFVEEYAFFKDSAKIADELRLIKSFARMGEPIADARRAMYIDAIRILGGGGGSGGGGSMRNFIINNVISNKRFHYLIRYGDPAHLHEIAKNEAVVKFVLGRIADIQKKQGQNGKNQIDRYYETCIGKDKGKSVSEKVDALTKIITGMNYDQFDKKRSVIEDTGRENAEREKFKKIISLYLTVIYHILKNIVNINARYVIGFHCVERDAQLYKEKGYDINLKKLEEKGFSSVTKLCAGIDETAPDKRKDVEKEMAERAKESIDSLESANPKLYANYIKYSDEKKAEEFTRQINREKAKTALNAYLRNTKWNVIIREDLLRIDNKTCTLFRNKAVHLEVARYVHAYINDIAEVNSYFQLYHYIMQRIIMNERYEKSSGKVSEYFDAVNDEKKYNDRLLKLLCVPFGYCIPRFKNLSIEALFDRNEGSGPKKKRKVAAAYPYDVPDYA

SEQ ID NO: 266 - protein, 963 aa, Artificial Sequence
  Mutated Cas13d sequence, NLS-RfxCas13d(del5.13)-NLS-HA
MSPKKKRKVEASIEKKKSFAKGMGVKSTLVSGSKVYMTTFAEGSDARLEKIVEGDSIRSVNEGEAFSAEMADKNAGYKIGNAKFSHPKGYAVVANNPLYTGPVQQDMLGLKETLEKRYFGESADGNDNICIQVIHNILDIEKILAEYITNAAYAVNNISGLDKDIIGFGKFSTVYTYDEFKDPEHHRAAFNNNDKLINAIKAQYDEFDNFLDNPRLGYFGQAFFSKEGRNYIINYGNECYDILALLSGLRHWVVHNNEEESRISRTWLYNLDKNLDNEYISTLNYLYDRITNELTNSFSKNSAANVNYIAETLGINPAEFAEQYFRFSIMKEQKNLGFNITKLREVMLDRKDMSEIRKNHKVFDSIRTKVYTMMDFVIYRYYIEEDSEKDIFVINLRGSFNDDQKDALYYDEANRIWRKLENIMHNIKEFRGNKTREYKKKDAPRLPRILPAGRDVSAFSKLMYALTMFLDGKEINDLLTTLINKFDNIQSFLKVMPLIGVNAKFVEEYAFFKDSAKIADELRLIKSFARMGEPIADARRAMYIDAIRILGGGGGSGGGGSMRNFIINNVISNKRFHYLIRYGDPAHLHEIAKNEAVVKFVLGRIADIQKKQGQNGKNQIDRYYETCIGKDKGKSVSEKVDALTKIITGMNYDQFDKKRSVIEDTGRENAEREKFKKIISLYLTVIYHILKNIVNINARYVIGFHCVERDAQLYKEKGYDINLKKLEEKGFSSVTKLCAGIDETAPDKRKDVEKEMAERAKESIDSLESANPKLYANYIKYSDEKKAEEFTRQINREKAKTALNAYLRNTKWNVIIREDLLRIDNKTCTLFRNKAVHLEVARYVHAYINDIAEVNSYFQLYHYIMQRIIMNERYEKSSGKVSEYFDAVNDEKKYNDRLLKLLCVPFGYCIPRFKNLSIEALFDRNEAAKFDKEKKKVSGNSGSGPKKKRKVAAAYPYDVPDYA

SEQ ID NO: 267 - protein, 948 aa, Artificial Sequence
  Mutated Cas13d sequence, NLS-RfxCas13d(del5.12+5.13)-NLS-HA
MSPKKKRKVEASIEKKKSFAKGMGVKSTLVSGSKVYMTTFAEGSDARLEKIVEGDSIRSVNEGEAFSAEMADKNAGYKIGNAKFSHPKGYAVVANNPLYTGPVQQDMLGLKETLEKRYFGESADGNDNICIQVIHNILDIEKILAEYITNAAYAVNNISGLDKDIIGFGKFSTVYTYDEFKDPEHHRAAFNNNDKLINAIKAQYDEFDNFLDNPRLGYFGQAFFSKEGRNYIINYGNECYDILALLSGLRHWVVHNNEEESRISRTWLYNLDKNLDNEYISTLNYLYDRITNELTNSFSKNSAANVNYIAETLGINPAEFAEQYFRFSIMKEQKNLGFNITKLREVMLDRKDMSEIRKNHKVFDSIRTKVYTMMDFVIYRYYIEEDSEKDIFVINLRGSFNDDQKDALYYDEANRIWRKLENIMHNIKEFRGNKTREYKKKDAPRLPRILPAGRDVSAFSKLMYALTMFLDGKEINDLLTTLINKFDNIQSFLKVMPLIGVNAKFVEEYAFFKDSAKIADELRLIKSFARMGEPIADARRAMYIDAIRILGGGGGSGGGGSMRNFIINNVISNKRFHYLIRYGDPAHLHEIAKNEAVVKFVLGRIADIQKKQGQNGKNQIDRYYETCIGKDKGKSVSEKVDALTKIITGMNYDQFDKKRSVIEDTGRENAEREKFKKIISLYLTVIYHILKNIVNINARYVIGFHCVERDAQLYKEKGYDINLKKLEEKGFSSVTKLCAGIDETAPDKRKDVEKEMAERAKESIDSLESANPKLYANYIKYSDEKKAEEFTRQINREKAKTALNAYLRNTKWNVIIREDLLRIDNKTCTLFRNKAVHLEVARYVHAYINDIAEVNSYFQLYHYIMQRIIMNERYEKSSGKVSEYFDAVNDEKKYNDRLLKLLCVPFGYCIPRFKNLSIEALFDRNEGSGPKKKRKVAAAYPYDVPDYA

SEQ ID NO: 268 - protein, 983 aa, Artificial Sequence
  Mutated Cas13d sequence, NLS-RfxCas13d(del13)-NLS-HA
MSPKKKRKVEASIEKKKSFAKGMGVKSTLVSGSKVYMTTFAEGSDARLEKIVEGDSIRSVNEGEAFSAEMADKNAGYKIGNAKFSHPKGYAVVANNPLYTGPVQQDMLGLKETLEKRYFGESADGNDNICIQVIHNILDIEKILAEYITNAAYAVNNISGLDKDIIGFGKFSTVYTYDEFKDPEHHRAAFNNNDKLINAIKAQYDEFDNFLDNPRLGYFGQAFFSKEGRNYIINYGNECYDILALLSGLRHWVVHNNEEESRISRTWLYNLDKNLDNEYISTLNYLYDRITNELTNSFSKNSAANVNYIAETLGINPAEFAEQYFRFSIMKEQKNLGFNITKLREVMLDRKDMSEIRKNHKVFDSIRTKVYTMMDFVIYRYYIEEDSEKDIFVINLRGSFNDDQKDALYYDEANRIWRKLENIMHNIKEFRGNKTREYKKKDAPRLPRILPAGRDVSAFSKLMYALTMFLDGKEINDLLTTLINKFDNIQSFLKVMPLIGVNAKFVEEYAFFKDSAKIADELRLIKSFARMGEPIADARRAMYIDAIRILGTNLSYDELKALADTFSLDENGNKLKKGKHGMRNFIINNVISNKRFHYLIRYGDPAHLHEIAKNEAVVKFVLGRIADIQKKQGQNGKNQIDRYYETCIGKDKGKSVSEKVDALTKIITGMNYDQFDKKRSVIEDTGRENAEREKFKKIISLYLTVIYHILKNIVNINARYVIGFHCVERDAQLYKEKGYDINLKKLEEKGFSSVTKLCAGIDETAPDKRKDVEKEMAERAKESIDSLESANPKLYANYIKYSDEKKAEEFTRQINREKAKTALNAYLRNTKWNVIIREDLLRIDNKTCTLFRNKAVHLEVARYVHAYINDIAEVNSYFQLYHYIMQRIIMNERYEKSSGKVSEYFDAVNDEKKYNDRLLKLLCVPFGYCIPRFKNLSIEALFDRNEAAKFDKEKKKVSGNSGSGPKKKRKVAAAYPYDVPDYA

SEQ ID NO: 269 - protein, 26 aa, Artificial Sequence
  Cas sequence
  MISC_FEATURE (2)..(2): Xaa can be Asp or Glu
  misc_feature (8)..(8): Xaa can be any naturally occurring amino acid
  MISC_FEATURE (9)..(9): Xaa can be Leu or Met
  misc_feature (10)..(10): Xaa can be any naturally occurring amino acid
  MISC_FEATURE (11)..(11): Xaa can be Cys, Ser, or Thr
  MISC_FEATURE (12)..(12): Xaa can be Ala, Asn, Ser, or Thr
  misc_feature (15)..(15): Xaa can be any naturally occurring amino acid
  MISC_FEATURE (18)..(18): Xaa can be Asp or Glu
  MISC_FEATURE (19)..(19): Xaa can be Gly or Asn
  misc_feature (21)..(21): Xaa can be any naturally occurring amino acid
  MISC_FEATURE (22)..(22): Xaa can be Ala, Asp, or Ser
  MISC_FEATURE (23)..(23): Xaa can be Phe, Ile, or Leu
  misc_feature (24)..(24): Xaa can be any naturally occurring amino acid
  MISC_FEATURE (25)..(25): Xaa can be Asp, Glu, His, or Lys
  MISC_FEATURE (26)..(26): Xaa can be Ala, Ile, Leu, or Val
LXGKEINXXXXXLIXKFXXIXXXXXX

SEQ ID NO: 270 - protein, 50 aa, Artificial Sequence
  Cas sequence
  MISC_FEATURE (3)..(3): Xaa can be Phe or Tyr
  MISC_FEATURE (5)..(5): Xaa can be Ala, Ile, or Leu
  misc_feature (6)..(6): Xaa can be any naturally occurring amino acid
  MISC_FEATURE (9)..(9): Xaa can be Ile, Leu, or Val
  misc_feature (10)..(10): Xaa can be any naturally occurring amino acid
  MISC_FEATURE (11)..(11): Xaa can be Asn or Ser
  misc_feature (12)..(13): Xaa can be any naturally occurring amino acid
  misc_feature (15)..(15): Xaa can be any naturally occurring amino acid
  MISC_FEATURE (17)..(17): Xaa can be Ile, Leu, or Val
  MISC_FEATURE (18)..(18): Xaa can be Ala, Ile, or Val
  MISC_FEATURE (19)..(19): Xaa can be Lys or Arg
  MISC_FEATURE (20)..(20): Xaa can be His or Tyr
  misc_feature (21)..(22): Xaa can be any naturally occurring amino acid
  MISC_FEATURE (23)..(23): Xaa can be Pro or Tyr
  misc_feature (24)..(26): Xaa can be any naturally occurring amino acid
  MISC_FEATURE (27)..(27): Xaa can be His, Lys, or Arg
  misc_feature (28)..(28): Xaa can be any naturally occurring amino acid
  MISC_FEATURE (29)..(29): Xaa can be Ile or Leu
  misc_feature (30)..(31): Xaa can be any naturally occurring amino acid
  misc_feature (33)..(34): Xaa can be any naturally occurring amino acid
  MISC_FEATURE (35)..(35): Xaa can be Ile, Leu, or Val
  misc_feature (36)..(37): Xaa can be any naturally occurring amino acid
  MISC_FEATURE (38)..(38): Xaa can be Phe or Tyr
  misc_feature (41)..(42): Xaa can be any naturally occurring amino acid
  MISC_FEATURE (43)..(43): Xaa can be Ile, Leu, or Met
  MISC_FEATURE (44)..(44): Xaa can be Ala, Gly, or Pro
  MISC_FEATURE (45)..(45): Xaa can be Asp or Glu
  misc_feature (46)..(49): Xaa can be any naturally occurring amino acid
  MISC_FEATURE (50)..(50): Xaa can be Asn, Gln, Arg, or Ser
RNXIXXNVXXXXXFXYXXXXXXXXXXXXXXXNXXXXXXVLXXXXXXXXXX

SEQ ID NO: 271 - protein, 33 aa, Artificial Sequence
  Cas sequence
  misc_feature (2)..(2): Xaa can be any naturally occurring amino acid
  MISC_FEATURE (3)..(3): Xaa can be Leu or Met
  MISC_FEATURE (4)..(4): Xaa can be Ser or Thr
  MISC_FEATURE (5)..(5): Xaa can be Ile or Val
  misc_feature (6)..(6): Xaa can be any naturally occurring amino acid
  misc_feature (8)..(10): Xaa can be any naturally occurring amino acid
  MISC_FEATURE (12)..(12): Xaa can be Asn or Ser
  MISC_FEATURE (13)..(13): Xaa can be Ile, Leu, or Met
  misc_feature (15)..(15): Xaa can be any naturally occurring amino acid
  MISC_FEATURE (16)..(16): Xaa can be Ile or Val
  MISC_FEATURE (18)..(18): Xaa can be Ala, Ser, or Thr
  MISC_FEATURE (20)..(20): Xaa can be Phe or Tyr
  misc_feature (21)..(22): Xaa can be any naturally occurring amino acid
  MISC_FEATURE (23)..(23): Xaa can be Ala or Gly
  MISC_FEATURE (24)..(24): Xaa can be Phe or Tyr
  misc_feature (25)..(25): Xaa can be any naturally occurring amino acid
  MISC_FEATURE (26)..(26): Xaa can be Ala, Cys, or Val
  MISC_FEATURE (27)..(27): Xaa can be Leu or Val
  misc_feature (31)..(32): Xaa can be any naturally occurring amino acid
  MISC_FEATURE (33)..(33): Xaa can be Phe or Leu
LXXXXXYXXXKXXVXXNXRXXXXXXXXERDXXX

SEQ ID NO: 272 - protein, 21 aa, Artificial Sequence
  Cas sequence
  MISC_FEATURE (3)..(3): Xaa can be Ala, Gly, or Ser
  MISC_FEATURE (5)..(5): Xaa can be Cys, Asn, or Val
  misc_feature (6)..(6): Xaa can be any naturally occurring amino acid
  MISC_FEATURE (7)..(7): Xaa can be Ala or Pro
  MISC_FEATURE (9)..(9): Xaa can be Phe or Tyr
  MISC_FEATURE (13)..(13): Xaa can be Ser or Thr
  misc_feature (14)..(14): Xaa can be any naturally occurring amino acid
  MISC_FEATURE (15)..(15): Xaa can be Glu or Asn
  misc_feature (16)..(16): Xaa can be any naturally occurring amino acid
  misc_feature (19)..(19): Xaa can be any naturally occurring amino acid
  MISC_FEATURE (20)..(20): Xaa can be Asp, Lys, or Arg
  MISC_FEATURE (21)..(21): Xaa can be Asp, Glu, or Asn
PFXYXXXRXKNLXXXXLFXXX

SEQ ID NO: 273 - protein, 1057 aa, Artificial Sequence
  MH_4866
MEENKVRFTNTSNVKRPKSLLKQMGHKSTFLLDDTLIVTSVAKGKNEDQKGKEQAASKSKVAPQSHIELLSTIDGEVLGGRKELLATTVSRQEVTISGKIYNLNTKTPESTTVTMANPAVLLQKNSSTTQVARKTDYLGIKSALEKEFFNDFSNSGFNDNVRVQIAYNILDIRKILATTINNIVSMFYNLDRTTGDIADETKKSTNTDIIGMIKTYLKYDQAKNSNDPSIKKTFNKAEELLINTKAYHTYFDRLFTTPTRQAFKAGKLKDTNDKKSNLPCEFSKLSEKDQEEFKNEAITHNYDVLRLLGLGRQLVVHEKYKSDEHNKDNSIESLFNIDKIIRNSNDTMDLLKRLDNIYLESAEQIDNSFKKSSATNCLILEELYKRIGKAKTQAELYKDYYRYAILKEDQCLGISFNRIKEAVLEKLKEEQRYKNFEYRNDNKRFYTLCNFVLWHYMVDLRDRNETRAGHQQTDRNEIEELKSKLRACCDNNGDGGENQKYAIYKEFVNFHWTDLRTSINTLYDLCVKYKYTAKNYRIDSKIQIDNQLSSSANNVKTFVKYIYFLSEFLDGKEVNVFFNELVEKFSNIAEIVTTVNDNINNSSKKSPNISFLPQYSLFQEAGTVADQLRNARNIKHATLRARINDKVADKDSKMSPSKQTISDALYMLIDENDTIENYKQLIWDEKESGTWVKKATGNNKVRNFIINNIIMSKWFMYISKYSDPRNCSKIMHNKEAVVFAMSSIPDAQIEKYYKRVTAKSVQYGNKTAEEMRSIVIDALMNFSLKPVLTGVANNDYSNENRERDIGIIQLYLTVAYIVTKSLVNVNKRFLLAFSCLERDVPLILNGKSFKDANILVLSEKFIAEDQEIEQKYKLAKKNRITPNMSKEDVKNVFKELNAEYKSKHYAESLTRPRDPDSKKDKSCAYLVNNLNEAKKIENVLMDFKNKVDHLNVVKSAPEYMSNIKNIDSFYGIFCFALQNILADKMIKWSVNEKNSKEDVEIINSYGQELKKKLDSRHTFDRDAMWIINMPFAYNFPRYKNLSSEYLFYDKEYEKTKK

SEQ ID NO: 274 - protein, 945 aa, Artificial Sequence
  037_-_emb|OIZA01000315.1|  compressed
MAKKKRMTAKERKQNHRESLMKKADSNAEKEKAKKPVVENKPDTAISKDNKPKPNKEIKKSKAKLAGVKWIIKANDDVTYISSFGKGNNSVLEKRIIGDVSGDVNKDSHMYVNPKYTKKNYEIKNGFSSGSSLVTYPNKPDKNSGMDALCLKPYFEIDFFGHIFTDNMHIQAIYNIFDIEKILAKHITNIIYTVNSFDRNYNQSGNDTIGFDLNYRVPYLEYGGGKDSNGKPNKISAWKKRENFINFYNEAKPHLGYYENIFYDHGEPISEEKFYNYLNILNFIRNNTFHYKDNDIELYSENYSEEYVFINCLNEFVKNKFKNVNKNFISNEKNNLYIILKAYGEDTENVEVVKKYSKELYKLSVLKTNKNLGVNVKKLRESAIEYGYCPLPYDKEKEVAKLSSVKHKLYKTYDFVITHYLNSNDKLLLEIVETLRLSKNDDEKENVYKKYAEKLFKADDVINPIKAISKLFAEKGNKLFKEKIIIKKEYIEDVSIDKNIYDFTKVIFFMTCFLDGKEINDLLTNIISKLQVIEDHNNVIKFIFHNKDAVYKDYSDKYAIFRNAGKIATELEAIKSIARMENKIENAPKEPLLKDALLALGVSSNDFDEKYEKYFKTDVDADKDHQKVSTFLMNNVINNSRFKYVVKYINPADINGLAKNRYLVKFVLSKIPEEQIDSYYKLFSNEEEPSCEEKIKLLTKKISKLNFQTLFENNKIPNVEKERKKAIITLYFTIVYILVKNLVNINGLYTLALYFVERDGFFYKQICEKKLIETLKKKDKKQLYNDDDYLLLPEIFSGSKYREETKNLKLPKEKDRDIMKKYLPNDKDREEYNKFFKQYRNNIVHLKIIAKLSELTKNIDKDINSYFDIYHYCTQRVMFDYCKKNNNVVLAKMKDLAHIKSDCDEFSSKHTYPYSSAVLRFMNLPFAYNVPRFKNLSYKKFFDKQ

SEQ ID NO: 275 - protein, 924 aa, Artificial Sequence
  PIG-022_GL0026351 compressed
MAESYKIKSKKTRTKRAGLKSSFVNENKGLMTAFGKGNNAVIEKRISGNLIENVSNKPRFSVEFGNKEYIINDKKLGIVSDDPRESQKPVGEDGIHCKRALEERYFGKTFNDNIHIQLIYSILDLEKILAVHSNNIVYTFDNLRRKETDEYDDFIGYMSTVNSYEEFMNPEKLLPGKDQSVYDNINRSRETFLEYRKNPRLGYFGKVFYEKVTDPKNKSKKKMRLISEKEMYYIFALLGGLRQFCTHDKNRARNWLYSLDTMLNDDAKAVLDKYYVSTVSSLNKHFVDNSAKKDFSIIFNALNITDIELKKNIAKEYYEFVCRKNFKNIGFSIKKLREYLLEKPEFCNLKEDKYNSVRSKLYRLIDFIIYLNYKDAKFENDNDEKIERFVSKLRKCPDEASKETVYQTESDIIKKSIYGSINSIKRGMMSVKSKYGKLELDKQTINQLKRAVDDISINTKGDYFTKLMYLISLLIDGKEINDLLTTLIHQFENIASFIDVMKKENINYEFAEKYKFFNTSKNIACELRTVNSFARMTGFMENDESTKFIMFREAADILGTSYTDDELTDHLNLKKTRLNARSKADTGLRNFIISNVIKSSRFKYLIRYSNPKKVKAIAENKKLVRFVLDKIPDPQIIRYCNTCGFKVGERQENINTLAKAITNFSFSAFEKVKQSANVENDTPDAIDKAQKQGLISLYLTVLYLFIKNMVYVNSRYVLAFHCLERDSQLLKITSGYNNSSYNNLTNYFIDNKYLNPHASRYLKVNISNADEWSIVKFRNGTAHLNSVRNIDTCIEGLKDFKSYFEIYAYTVQKSIKKYFDAEFSEDRNIEDGKISLCNGVYIHERQKNGKPKITVKINPKTIEYMESVDKYGSYTKDFVKALNTPFGYCLARYKNLSIEPLFDRNTVYNKEDVTEEFSVNSKEQ

SEQ ID NO: 276 - protein, 1022 aa, Artificial Sequence
  PIG-046_GL0077813 compressed
MAKKITAKQRREERERQNKQKWAKKQDDATAVFECEANIKPADSKDEDCANTSIKRKKTQAKAMGLKTVLGFDNKIAIASFTSSKDSKSSHIERITDPNGKTIREDVRMFDSNVDECSINLEKRMTVEERQKDGTIKKDEKDVKSTICNPYSNECGKDYIGIKSVAEELFFGRTFPNDNLRVQIAYNIFDIQKIFGTYINNIIYSFYNLSRDEFQSDNDVIGTLYMLKDFDGQKETDTFRQARALLERTEAYYSYFDNVFKKIDKKKKRNDDYEGKRNEILRYNFNVLRVLSFLRQICAHAKVKVSSDNDREKGGVFVDSLDALFNISSFFDAVAPELNEVINSVYSKGIYDINDNFVKNDKNNFYILSKIYPEVARENLLKEYYYFVVSKEGNNIGISTKKLKEAIIAQDMSYIKSKDYDTYRNKLYTVLCFILVKELNERTTIREQMVADLRANMNGDIGREDIYSKYAKIIYAQVKPRFDGMKNVFEEEAKGVIVPDKEEAVKFSNGALDKSEIERFCITSANTDSVAKIIYFLCKFLDGKEINEFCCAMMNKLDGINDLMETAEQCGAKIEFVDNFNVLSKCGTISGQIRVVKSISKMKKEIDVDNETIFLDAFELLGKRIEKYKKDDSGNVLRNDDGKVLRTKEYNNIRKMLCKKDRRLNFIANSIIKNKWFSYIVRYNQPSECQAIMKNKTLVKFALDELPDLQIQRYFVALYGDEDLPSYGEMRKILLKKLHDFSIRDFDEEIGSLFDEMKRKDKFCESDRKKCLFRLYLTIAYLITKSMVKINTRFSIACATYERDYALLCASNKQERAWSSGATALALTRKFLNQDKLIFEKHYAREGEISKLPKEERKAMRKVNDQLLKQTHFSKHSYCYIVDNVNRLTGGECRTDKRVLPVLNEKNDNAGILSDFRKTIAHLNVVHKMVDYVAEIKGITSYYAFFCYVLQRMPVGNKNEKNALKEKYSETAKSYGTYSKDFMWLINLPFAYNLPRYKNLSNEQLFYDEEERNETEGQIDRL

SEQ ID NO: 277 - protein, 1027 aa, Artificial Sequence; identical to SEQ ID NO: 170
  pig_chimera compressed
